United States Patent Application Publication US 2007/0237770 A1 - sequence listing, part 15

SEQ ID NO: 1595 - DNA, 26320 bp, Mus musculus
tcatggatggctgtgagccaccatgtgggtgctaggaaccaaacctggagcctctgcaaaggcgacttgtgcttttaaccactcagccgtctccgggccctgagccgagacagcctggtagaaagcctcagcccagcatggagctgcctcccaaattctggcattcaaggtgtgcaccaccactgccggcttgtctgctttcaaagagctttaagtgggcacgcacatgtgtggtggtcccaggacaacactgtagagttggctttccctttcacctttatgtcgatttcaggattaaactcagattgtctggctcgaggagggggtcttacccactaccctactccagtagacctgttgttttgttttgttttgttttgtttttttctggcaaagggtctgtgctggttaatttattgtcaacttgacacacaaactggagacacctgggaagagggaacctcaattgaggaacagcctccatcagattgacctattggcaggtccgggggatattttcttgattaatgattaatgtgggagggctcaactactgtgggtagtgacacccctgggcaggtggtcatggactgtataaaaaataacaaattaaaaaacaaaccaaaaacagcaataacaagcaagctgagcaagctatggagagcgatcactttaaagcaacattccctttctgctttacaaaccagttctgcccacaggctcctgctgtgcggtccagcttggcttctcttgatgatgagatgatgaattccaatcataagatgaaatgaaccctttccttttcaaggtggttttggtcaatatgttttcctttttctgtttttgttgttacttttctttttccaagatttaaaaaaaatttttttaaatagtgtgtgtatgtgtggtgtgtgcctgagaggcccatgacatgcatttgtgaatgtcagtgcagttgcccatggaggttagaggagcaggacctccctagagctggggttaggggcagttgtgagttggcctatgtgagagctgggaatggaacttgggtcctctgcaggagcagcctgcggagttgtttctccctctgcttggtcagtgtttttcacagcaacatgaaagactaggagaggatcttatgtaacacaggctggttttgaacttgctatgtagttgaggctagccttgaacttctgattctccgacctccacctctcagtcactgggattctgtgtgtgtgctgccatgcccatcagtacctagtttagccaatatcagtccccaagaacaagaagtatcaaaggagaaaagcactctagcgcctctcatccagagcatcccccatcatccagcagcccaaggtacataacaaagagaggagatgacactctcccaggggcacggcatgcttccagagtccactttgactttaggaaacattcacagtgtttcctaaatgacttctgctcctggagaagactggagtgaggacagccaggcagtcagaagggccacattcacatggtcacacccacatgtaccctcctgatttcctggctttgttaacttcccttccataactctctgtctctctctgtttctgtctctctctctctcagtctcttgtcttcccccagcagttctcaacctgtgggtctcaacctctttcagggttgaatatcaaatatctggcatttcagatatttacatcacaactcataacagtagcaaaattacagttatgaagtagcaataaaaataattttatggttgggggtcaccacagcatgtggattaaagggttgcagctttaggaaggttgagaaccactgcctgaaaaccttaatcaagcaacatttctagaaaacctctttatatgacctagtaaaaagtttttactgaggtgtggtagtatatacacctgtaatcccagtactcaggaagtagaggcaggaggattgtcacagtttgagaccaatttggtcgacaaagagagtcctaggccagccaaggctacatagttaaaccctgttacaaacaaataaacctgaaaaacaaaatgaagcagagatgtgaaaggactgagcgaggaaaggtgcttgttaccaagtctaggatgtggtagaaggaaagaagtgattgatccctgaaagttgtcctctgacctcctcatgtatgtataagtacacacacacacacacacacacaaacacacacacaccaccaccaccacccccaccacccaaccccacactatacagcaaatagtaacagcaaagttcctggcatggtggcacacacctttaatcccagcactcaggaggtagaagcaggcagagctctctgagtttgagggaagcctggtctacaaagcgagttccaggacagccaggactggtccacagtcctgtctcaaaaactctgtctcaaaaaaccaaactaaccaaccaaccaaccaaccaaccaaaccaaaccaaaaacaaataaacaaacaaaaagaccaaaaccaaaaccagtaaagcaaagcaaagcaaaacaaaacaaaacaaaacagcaaaagagtaccatcactaaaactgcaacacaacacaacacagcacaacaacagctttagtcccagatctccgtcacaaaactggaaagttccttgagagtactttgaccatctgtggccactacatcttctgtctgtttgagacaggggctcactatcggaccctggtggtctggaactcactatatagacaactgcctcaaatttgtgacaatcctgggaataaggcctgcaccaccacacctggcttgtgaccatcatattctttgctgaggcttcacagatctgtcaacaagacttgtaaggtggctgctgcctggaaagacacagtgtatccgtggagaacagagctcattcttggagggtttgggccaagtgcagtttaaattctggcagtgttcatatttaatcttcagaaaaggagttaatctgtcagatctcggttccttgaattgcagaattctacacacactcacacacacatgtgagagcacatagacatacagacacacaccacatacacagagatatacactaaataaaaatttctttttaaaaaatgagatggtacatatcaaatactcataagaggacctaaatggctgggcatatagtgcatgtttgatgtgtatgagaccctggatttggtggccagaactaccagaacaatgtcgtgttacagaaaaaacaaactgcatcagaaggccagtgctacgagttagctattgatacttataattcattgacatccctggagacctgctggggcaatcttgtctcagaacctgctccgcactgaactgtgctatctctggctctaattacttcccttctcccacactttagagagccggtagaacagaagtctataacaaggcaggtgcattgactcgttttatgtgagtctacctgcacggttcgagggtggggagcctgaaaacaccacagctgctcagtctgcacagctggatgcctcagtagtcctaagtggtgctgacttcctgggtgactcctggacagccctggtcttcagtctgcattgggaggctgaggcagctgcatgctaatggcagggacagtggctttgaccagacaaaggagatcaaacaattgacaccttttgtggaacttccctggaggtggaccatcctgggaggtcctgcccaccctgggtgggctttcttcctcagttgtccttcatggaaatatcctatagaccttctcaaagaattttttagttgagtccggagccaatcaaattggcagttaagattaaccatcacagagcacctttgatcccagcactctagaggcagaggcaggtggacctctgagtttgaggccagcctagtctagagagagagagagagagttctagggcttcagaaagaaaggctgtttcaaaactactccttcccccaatattaaccaacacaatttgtctctccctctttctgatgtttttagttgagatgtcaacaaagaccaatggcggagctcgaaggaagccttggtggtggtgtcctgtcacttggtaggtgcagctctcttccttccacctctagaattatgttatccagggtgttcagtgaacaggacaaagaaatgaactctacttgtgtaaccagattattatgggctacctctaatctgtcagaaagaagcaaggggctcagctagctcatagtttttatttatacaagcttttctcattagtttatttgacagtgctatttaggagccacctcagactcctcttcaaatatccaaaatgtccctggaaacttatattagttttctatcaaaatccaagtacgtggctgcttcctctcttcctccttctcctcctcctcttcttcctcctctttctctaccaccatcttcttcttcccattcccattcccattcccattcccattcccattcccactcctattcctattcttctttggagacagagtcttgctatgtcgcccagattggtctcaaactcacagcaatcctcctgcctttatctcctgagcactaggattataggcatgaaccaccatgcccagtttatcaagttcctggggactaaacacggggttctagcatgctctctatcaactgagccacattccatctctgatgtcacccatctttaagcaatgataggtttcttctctgtgcgcttttttcatgtggtgcttagctatttggcttccgtctgttcgctttgtgctgattctccacctcccttgctctcagaagcacatacatgtgagcagctttccatttaattttggggatgtatgatttctgaaatgttattgggaacccagtaaggaagtgactgaaggaaggcagcaacatcccatttggggctgggacgttaagtgggaataccccaggcagatgagaagctaaggttattccaggctatcttagtcagggtttctattcctgcacaaacatcatgaccaagaaacaagttggggaggaaagggtttattcggcttacactttccacattgctgttcatcaccaaggaagtcaggattggaactcaagcaggtcagaaagcaggagctgatgcagaggccatggaggaatgttcattactggcttgcttcccctggcttgctcagcctgctctcttatagaaccaagactaccagcccagagatggtcccacccacaaggcctttcccccttgatcactaattgagaaaatgccttacagttagatctcatggaggcatttcctcaactgaagctcctttctctgtgataactccagctgtgtcaagttgacacaaaactagccagtacacaggccaagggaaacctctgtcatgggtgcttatctctagccattgtgttaatattgcccattcccatcagcttatagatctcttgaggtcatgaacccatgtgagttcctaaaatgaccagatagctcattattttgccatttgatgcctacttatggattgatttggtatgtaatgaactttctttgtgtttgtgttcactgtgatattgtatttctagtatttcactgtaaagaacatagagacgtaaacaaacaaggtccacaagtccagtaacctcactacctagagagactactgttaatatattgtcctgggtgcttctcttttcttttttgagacaggatcacatcatgtagctctggtttgtctagaactctctatgtacaccaggctaccctggacctcatagctatctgcctgtctctgcctctaggcatgaaagacaagcacaccatcatccccaaatctctcccttctgaccaagagaggttcttgaacctattattcttctgtcttagcctcctgagatcagggctatacagatgcatgtcactattcctgactgttttctttctttctttctttctttctttctttctttctttctttctttctttctttctttctttcttccttcctttctttctttctttctttctttctttctttctttctttctttctttctttctctttctctctctctctttctctccccctctctctctctttctttctctctctttctctccccccctctctctttcttcttcttcttcttcttcttcttcttcttcttacttcttccttcttcttcttcttcttcttcttcttcttctttttcttctctcctcctcctcctcctcctcctcctcctcctcctcctccttctttcttcttcttagaaagagtccgaggtatcccaggctggcttcaaactcagtatgtatcaaaggctagccttgagctcctgatcctcctgactcttcctcccaaggactggggttataggtgtgtattactgccgttggatgtctttatattttaaagcaaaaatggtatcataatttgtgagttcagaatttatcttcatttaaacatcacttcagaaatcctgatgtctcttgctcacccagcttcccactaaagaactgcagattctcttctgcgtatggtggcatgtctcagaccacccacacaagttgaaaacacagtgagctgaaaaatgtgcagatgccacggcttaatctctctgcccagagtagggatgctatccttcagcacgacatctgctcactatctctagcccaaggaagaaaattacaacttaaaatttgaagtctggttcctattgatcatgtatcttttacagcatcaaaaaaattgaaaagaatctcttcatttgttactttgtgttgctacaagttcttactatgtgactcaagctggcttcaaatttgctattctcctgtcttagccctcccacgtgctatgattaatgtatgtgtacctccatgctgagtggtgattagagccattctaagaccaggggctatcaactctaatatccagttccgtattctctattcttaattgccatttatagttcaagggcagcccacctatggactcatatactagtaaggtaaaaagatgagctgaaatagttacatgtcactcctgatcctcctgccctctctctcccaaggaaccattaccacagactttgtatctgtctctctacaaatcccaggctggaaatcacaatggaaggcaggccaggctggagtggccctaaagagcttcaaccctgtgctcagtgaccttagaccagaattgctctaattttcatagcagagatggcaggactaattctcacattcaagatggctcctattaacctagaattgtatagcataggacctggactgccctcctttgaacctcacgaattatacacctagagctgtacacacacacaaaaaaccctcatcctaacataggaagacacctgtctctttgtcccatgtgacccctttactattaacctacaggtagttctcgacttgccattagataattggataaattaaaaagaaaatcaaatatagttttgtagacattcttttaaatgcttgaagatacagaagtaaccaagttactgagtgtaacccaaattgtttggttttcaaaaagctactggtattgtctggatagatgcctcagagacggagggaaagcagtggctgctcttccacaggactggggtttgattcccagtgcccagatgggttacaattgactgtaactccagtcccaggggatttaatccctttctctggcatctgagggcaccaggaatgcacatggaacagagacacatgaatagacaaagcaccatacactggggctggagttaagagctgataaggggacctgggtttgattcccagtacccacatggtagctgacaaccaactgtaactccagtttgaggggatctcctaccttccactgacctcagatgccaggtaaccacaaggcacacatacgtacatagatagaactagggcctcatgcatgcaaggcaagtaagtgttttgcctctgagttttatcccctgccctcttgtatgctttctctttcctgtttctttatagacagaatcttgtacacacctgcctaccccaggtttcgaacttgcagtgaggacttctgcctctgccccaagagtactaagatgactggtgtagtgcagctgcttatagattgtaagttatcttcttcctttaggagctcagggctatgggtgtagcttagtggcagagggcttgactagcgcatgtcagggcatgggctgtatcctaagcactatataaagttcttaacttttcatttatttatcttgacacacagacacactctctacacatttctggctgtcctggaactcactatgtagaccaggctggccttgaactcaccgagatctgcctgctattgtctcctgagtgctgggattaaagtcgtgcctcaacatgcccaactaagaagaaagtttgtaaggaaagagctagtaaattgaaaatggctggaacaaagagcctggaattgggttgtaaaggtgcccacctggcatgggaaagtacacaaactgcactgtgaagggagtaacaggaaaaattacatctatgacaagaactcggaagctgggtgtggtggcacatgcttttagttctagcaatcaggaggaagagacaggtggatcttcaagggtagccttgcctatttagtgggctccaggacagccagaactacatagtgagacttgtcccccttcccaaagaactccgtactttggaaagagcatgctggcaatcatgatgatctggttggcacaagtgagaatagagattatgatgatcaaaaaagtgttatcacaggtggggacagaaacaaaactagatgcttcagaaatagaggtgagtcgaggaacctggggtgtgtgtgtgactggtgatggaacacttccagagagtggggcaggaacaggatcaacgtttgacaggttttagtgtctgtgagaggtccaaaaatgcacgttagatagtttggaactactgaggggcttctagatggtctggattgtaagtagaagccatcaactgtttatggtgagggtaagagtcctgagaatgggacttttactttattattattattattattattattattattattattattattattagagccagtgattcactccaatccaggctggttcagaatagaattcggttgaatactggcactttaaaagatcacaagggtaaagagacgaggcatccttattaatagggtcaagataacccccccctaagatcttgcagattgtaaagagctgataaacagctcttccgcgtgagcatcgtcatcccccagtttaagagattgagcagttctattctttagcactgttggggagaacagaggtcagattgacagaatgtagcagagagtaggagtgggagtctttcctgacagtgggtcctacttgcttccaataatcacactctgggccacttgcaacggctccttgaaggagccgcggtgcagagggggttaactcagttgtcaggagaaggcaggcgcctaaaaacgtttggatttcaagctgtagacattggcggccttttagtcagagccgcagatagggcgacagcggaggagtgtcgggacaacggaccaagccggcctagggactcgctacagcaccccgcctcctcgcttccgcaagtggagagcgaagagggcaggggcgggtcctgtaatactgaccacgccccttccgctcgctccggggagcgcagctgggcgtggactcaagggcggggtctgcggggcgggacctgcagggtggggccgatggcgcggggcggggctctgaggacagcgacagcccgcgcactgggcaggagttactgctgctacggtcgcccgcgtcttcaaggtctctgcgcttcctcaccggagacctggactcggccgccatgtccgccgcggaggaggttgatggcctgggtgtggtccggccgcactatggctgtgagtgccgagggcttgggggtgcgcgggcgagggaccaagctcgggttttcccaggggctcagccgggcgggtgcgccgggtggcttgggaccgcacggacccggaagagcagctggctgtatggctggtagcaaggttggcgcccgagccttctcgagctccggaggcggcgggtagaaacctggaggcctctgccttcgctaggcgctgcggcaggggagccccacccagctcctccaccggttagttctactgagattggggaagacggcctagggtgaggtggcaggagaactgactgtgcagggcgtgtcctgggcactggacccaggggttctgctcgggcgtggtgggaaggtgctgcccggattgctgcctgcgagggtgacccagggcgcagacccgcgcagcctcaggctagctgcgaggtgcagttttaggcaagcagcttatgctttctcctgctgggttctttctttagcatttcaaaagtaaaattaaaacataaacacacccaaaccggctccccccacttcctcattttctgtgactatccctgcaaccttagtaaactaaccagctgtacgtgggatagtagttacaagaggatccctttgagtcccaggtttagattttatgttttgggaaaagtactttcttaaaggatactttaacacatccagttatgcattggatagtgttataatgtgtgctacgtttgtgaaattagggatgaaaaagatcaaacagtgccttcaaaacctgtccgagaaagagacaggtgtacagagattgataattagatgaggggttgggaatttagcccagtggtagagtgcttgcttagcaagtgcaagtcctcagctccaagaaaaaaaccaataaggtgcaataaagataaatgatgcatgaactaactctaactgggtataaagagtaatgggggtgaagagaagggacttaacaaggccatgggaaggtaggtgctgacttttaaacagaggcttggaggatgcagtgtggggcagggtgagcaagacatgactttgagagggcagacacaaactaaatatggtattggagaacatagggttactgtacgtggaaaaccgagggcatcgaagtgcagaggtggaattgaaagggagaggagaaaagtaaaaaggatttcccgaagtagcccaggctagagtgagaatagctctgattgccttcccaaggagttatcccttgggaagacagtggagaaggcagatggctacaaggtaaagtccacaggccctggagtcaggtgggctgcaaaggcccttgattagccctccgactgagttcttccagcctcagtatcctcagctgtcaaatagtggtgatcacaggatgggtctgggctagagtaggagcatgtgtgtaaactgtgtagtccaggagcttcggttatgaagagaggggagagtgtgaccaacaaggatagactatagttgatgcctcttgaagctacaagaaaatgtagtacatatatatttaaaacacttaaaattttggttccttgataatttcttttttaaagatttatttatttattttatgtatatgagtacactgtagctgtacagatggttgtgagccttcatgtggttgttggaaattgatttttttaggacctctgctcgctctgatcaacccctcactcaggcccaaagatttatttattattataaataagtacactgtagctgtcttcaaacggaaaatcattttgtagtgcccctggctacccatatatccactagttagcctgcctttctaggtgactagccagcaatttgatggcggtggccttcatttattgctgaggaaagttacagagcttggtgtttacactctttcctttctgttttagccgtcctggataatgagaggctcactgcagaggagatggatgagcggagacggcagaacgtggcttatgaatacctttgtcatctggaagaagcaaagaggtatggagggactagttggagagtggcctgggagaaggagctgatgtgctgtgcctttaaaagagttgttttcatttctgtgtatggtttctggtatccatgtatggctgccagtggaggttagaaggccttagatctcccctggggctggagttacagtcacctgatgtgggtggtggcagcccagctctggtcctctgaaagagcagcaagtgttcctaactgccgagctgtctacccagcctccacaggtggctctctgtgtgcattatgttttaggtaagagtgttggcggctggcagttgaaagggtaagtaggtaggataagtgtagagtgtttattcatgggaacaagtgggccgtggtgggttatgatgaaacactctgtcgaacacttgtgcctgctgaaagatctcccacagttgtgtttttcagcctttctgtttgtagtggttgttttgggtactgccagctgtcagaaataacgttttaagttagggtttgatgttcttgatcttctcagtggttcctaattcttcagggttttggtttgtgtattgagccccatctcctggtgactcatggagtgggtattaggtttagggggctggtaagggtggagctgaaaggggctgaggacatacctgagtggtaaagtacttgttgagtgctcaaggtcctgggagacacccagtgccagaagaaaactgcagaaccttcttacgagggtcatgccgtagctatagatctgtccaccagcagcatggtgaggcctttccgcaaactcaatgctgccacacattttttttttttttgagatgggatctcagccctaggctggcctcaaactcatcctgctgctgaggcttctctggtcctcccactagcatctcccaagtgctgagattacaggcatgcgccaccacacccatctcctctgcattctttatgaggaggatactcagctgctgtttatcttctccagatatctcaagaccttgtgatcttaattttagggtgtcagtttgttatcagtggttccttttgttgtgttgcttacatttctttgcaaggttccagagcagataaacacaattataggtcgtgtacactgaagaataatgggagataattgtcatccaggcttagtgaaaaccagggatgttttagatgattaaaacaagagtggaaatttgatttgattgtcaagagctggccaggaaagttggcagtaaatatgagctcctaggcccaagaagcccttcagagctcccttttctttaaagatgacaaaaactgccccagatatggtccccttggcaccctgccctggactctttataagactgaagtagcggcttccctggaactggagttgaaggagattgtaggccaacctaggagttcctaggtgctagaatgggaccggctcttaactccagagaatggaagcttagtacgatggttttggtagtgcccagggagggatgaggcataaagagcagttgctgcccctccgagctgctttccccatgtgatggcaaatggaactgcagggagcaagagaagaaggtactgtgagaaaagggacattttctcctaggaagtttgtaaggggatacaaacacttaagtcctctgccacttaaattgtgaacttctccttgtggaaggtcaaggaatttgtaagctgcagctggtctcagaagccatcttgtgtgctcccttgagccatcgggaatgagaaggaagacatcagcttgctgagtccctctcctacctgtaagagttttacttttccagaagtgcttgaggtttcgagccttgtgcctgctaagtgtggggctccattcctgacactaagtcaacttctgtcccgactagccacctcatttcagtgagaaaaccaaggcctgagctttcttagcctacctgtagcttctcttttagggggaggggtcatgtagcctaggctggcctggagttcacaatgtagctgagaatgacagagccctgagcccagtgccaaacaaagttgtctgccactacacctggcatagtttcccatagttttctggctaaggaatgttcattgtttgcgcagtggtcctcaactgggtatgtggtatgtgcattagaatctcttgcgaaagtttttacaaatgcggataatctgggttttactgccgaacactcagtaagtgtcctactgccgagccataccccagcttcatacctaaatatttcaaataccttaagtgatttagatcggctttcttaccctagttgagaagtaggatattcgtacttttaacacgtttaaattttctttgaatggttttagactctgacctattagaagttaatgatgctcttcacactttctttccgggtgcagcgctggcaacattttatttgcagtacgttagagcatgtccttcctgacaggcgtgttttccgggatagaaaagtagcctgattatgcaacccatcgagagaccactagtccctgaagggtttttcagttggttgtttacgttaggcagtaaagatgtttatgatattcttatttacttccttctttacttaaagctctgggcataatagctgtgtattgccttgttatattctggcaatgtggaaatgttgcctggtttattttaggggagtaaatggtatcaaatttgcattctgtactgttctccctgcacccccccccccccccccaaaaaaaaaacattcaacagccacctctggttagaaaatcagttatggaagagagtgaagaaacctggcaatgttatggtgggagtagtatttctaccgtcgcctaatgtgatgcctgctggccagtccgcatcagccaagatcctctccctgccccgtgcctcacctgggcagctgggtggtgtctgtgtgctcccggggctcattttccctcaagcaaaagcccaagtggccttgttggattggcctggtcctatttcctcccaatttggaggagccccaaggtctggagtttacatcaacttggaggccaggaataaagatgagagagattcaggggagaaaggctccctcatacttctatttataacacctctgcccctcctgctggaggctctacctttagtacagaggcgctattgtgtatcctgaggctctctttctcctgtacctttcacagagtttgttcttggggaaatgaggagtttagagaacgagactgaatgcatggagactgttgtttgtctgtatgtctgtgtgtagagagtagaggatgctgcaggtatgggtttgggtttgtagtttcccaaaaggttaagtgaggacattaagtgtgagtttcagaaaactgtatactgggaatggttgagactctaatgcagagatttctgctttattgtttgaaaagtggcttcagtatggaacttaaactgatgctctaataaaatattttaggatgccaagatatagcagagcaaaggctgtcaagggatgctctttagtgcttacacctatttccttacttatttatgtgtgtatttatggctcttccgattgggcttgacgtttattttagctaaggagtagctgtatgagaaagggatgccatttcatctgttgacggaggtgacattgacctgtgaggtatgtaggtactcgggtcttgagacgagaatgtaacagagacgaatcagaaggtggcttagggagaaaaagagaaggaggcaagagagaatgtactgggtaagccagaggagtcggagagcatgaggggcaatgcaggcaaaggaaacgtcagttagggtaacggtcacacagacagttcattctatactcgtcagtcatcgatttagtcgtgtctttcagggcctttctggtggatccctttgagtcttccctgggctaccttcttcctgagcacccacagcccagcttacagagtgaggacactcccccaactccctctgtagaaaggcaagtacaggctgtggctggctggagattgtctgagactacgtgatattaacaagagcttagcattaactggaagctctttactccacttgaggggaactggagaggtattttggaaagaaaacagcttttgaaaacagattcccttttgtgtgtacatctttgctgttggcatagaacattttctgggttggccttttgagatgcctctccagaatggtattagaattccagaaaaacatctggatatttcccagttcagactcttgattttgaaaacagaagttgggatatttaatttaggcaaaatccctaagtgtataggcaaggtacctaggaaaaccagcatgcctaccagcttttggagttttaagatggagaagtatagcttaaggctgaaggaagaagcagttgtgctacccacagggtaacagcactactcacagtaacagtgttactcacagggtaacagcgctactcacagggtaacagtgttactcacagggtaacagcgctactcacagtaacagtgttactcacagggtaacagcgctactcacagtaacagtgttactcacagggtaacagcactactcacagtaacagtgttactcacagggtaacagcgctactcacagtaacagtgttactcacagggtaacagcgctactcacagtaacatgttactcacagggtaacagcgctactcacagtaacagttactcacagggtaacagcgctactcacagtaacagtgttactcacagggtaacagcgctactcacagtaacagttactcacagggtaacagcgctactcacagtaacagtgttactcacagggtaacagcactactcacagtaacatgttactcacagggtaacagcgctactcacagtaacagtgttactcacagggtaacagcactactcacagtaacatgttactcacagggtaacagtgctactcacagtaacagtgttactcacagggtaacagcgctactcacagtaacatgttactcacagggtaacagcactactcacagtaacatgttactcacagggtaacagtgctactcacagtaacagtgttactcacagggtaacagcgctactcacagggtaacagtgttactcacagggtaacagcactactcacagtaacagtgttactcacagggtaacagcactactcacggtaacagtattacagggtaacagcgctactcacagggtaacagcactactcacagtaacagtgttactcacagggtaatagtggtactcacagtaacagctactcacagggtaacagttttactcatacagcaacagtgctactcacagggtaacagcgctactcacagggtaacagcgctactcacagggtaacagtgctactcacagtaacagtgttactcatacagcaacagcactactcatacagcaacagcgctactcatacaacaacagcgctactcacatagtaacagtgctactcacagctactcacacagcacagagctactaatgtgagttttctttcctagtataactgtcagtcacttttaccagagtccattgtaaactttacagatgtgaagctgaggcagatgatgtgtcacaggcttcagtcctagcactggggatggatgcaggaggaacagacaggccagcctaatctacacagtgaaatccaggccggccagggcaataaagagactttgtcttctaaaaaaaaaaaaaggtgaagctggggctggagaacggcttaatggttacagggattaaagaacacttaagttcagatcctcagaaaaatgccaggtgggtatggcctgtctgtaattccagccccagaaaacagtcgaacactagccatcttctcaagctctgggtttgattgagagaccctgcctcaatgaataaggtagcagagtgatgtcggatgatgattcctgtgataaaccttaggcttccatgttcacaaatacacatgtgcgtgtggccccatatgtgtatacatacataaagagaaatatgaatacacacacacacacacacacacacacacacacacacacacacacacactggaaaaaaaatacaaactgtgaagctgtctgggtagctcgagttgtaactccagcctttgggaggtagagacatggaggactaggaatgagagtcactgtcagcaccatcatctccagcatgagccacaggagactcagagaaatatggagctgggtggcatgtgacctgagccctcggggagactgaggcaggaagatcctgagtttgagggcagcctagactacatagctaggttctgtctaaacaaaacaaaacaggaggcttgtggggttgtgcatgcttacctaacctcaggatttggagactgaggcaggaagattaagaatttgagatcagcatgggcttccaagtgagacctgcctcaaaacaaacaaacaaacaaacaaaccagagcaaagtgaaacaattttaaaagtctctgagtagttactgtcattgctaagtcacacagctgcccccatgttactcacaactgcataaagcacactgaaaaagcctgaaactccttggagtcttggctgctgaggtaactgggccatggagaagaatgttgagatgcttgggtgaactggaaaagattgggactttgaatttgagcaggtataggctttgattccggctttacaagctgtttaaccccaggcagtgagctgcatgactctgcagagggaaaaaaatgttacagagttgctatgggagtcaagtagtagccccgagagatacagaaaacactcaacaaatgcatttttaagagatttacttcttttagtttcttttacatgagggttttgcctgcccatacttgcatgtgggtgctgggaattttaaacccacatcttctgcaggagccttgagccatctcgccaggcccaatggatacattctttaacctggtctgtggccaaagggagatgtaaggatggagggataagacacgttaagcacgttttaccaagtatgtagcctaggttgctatgaatgtggcccaacacattcgggcacaatcttatcacagtggtggaagttagacactcctgtaaggttgggagccctcgtttccactggagacttcagtgatttttggagaggaaacccagtcacagagaagagtggaggtggagggagtaaggaggctgcccttttattgactactatactgctgtatctagcatccctttacactaagatagcaataagggacggcagggatcgagggatgctctgtgtcaagtgcatagttttaggtagttgtatcataagttcaacatttttaaaagattcagtttatttttatagacatgtgcacatgtgtgatggggaggtcagatgagggagttgaacctcctggagctgaacttgtaggcacttatggcctcctgtgtgggagctgggaactgaacgcatgtcctctctaagagccattgagccatctctccagcaccacaaattccaaaatttctcactgtttttaacatctatataaaatttatttagatctatgccaatttaaaacattgctttgactattggctactaagctgaacattttgttacgtttttgtctatagttttatttttatatccagattttctgttgttgtctgcttatcttttatgtcgtctgcttatctttatgttaacttttgtaagctctccagtagtgtgtctgtgtgcacgtacatgtgtgtgtacgtgagtgtatgcacatgtttttgtgggtgagagtgcacatatgctcatatatgtggaagccaggagacaactccaggtgtcaattcctcaggcaaatatccactcttttggagacaaggtctcattgtcctgaggttatgtcaagtaaggctagccctgagattacaagctgctactatgcctggcttttcccttaggttctgggtttgactcagctcttcagtttgtagtgaatgccttcctgctctgcttccctgtgctctggtcacaggtatactcagcctgctaacttctctgtgatttaataactttacttaagattttctttaattgtgtgcgtgtgcgtgtgagacccggtctagctctggacttgcctgtcatggtgagttaaggacttctcttgactgcccagcacttcacttgctttatccgttcttactgagaaactgcagcagttttattttggctccttctcaagaactgtgacttgttaatttttttacttttatagaatttttgttcctttctgattggcattgtgttagcagttttgtctgtaatgtgggcttttcagtgggcctcttttagatgtgtatgtgtgagagacaggcaccttacttccaagtcagtcctcagtcagactctttttgatttataatgtattttaaaagctttccccctcccctttttatttctttttttaaaatttattttatttgtttacattccaaatgttgccctctcttttatttcttaaaattaattttcaagttagcacacacggtaatggggtcattgtctgttgtcatctttctgcagatgtgtcattatattttgtttttccatgtgccctctgccctcctcctggctggtcccttcttgcaatatctttttatttattttagctctaggaaattatccattttacctttaataattgcttctgattcattagttctgtcttgagggtgagctgcacaatctctttatggcttctcttcatttcatttgtttatgtaaagtcatagcaaccaagttgtggcgtaaatcatctgcagtggtcatcctaggtgtgtgttctgctgtctgtttgctgctggcttggtttagttctctctggttctgttgtctgacttcttagagcgttcattttgacctgtaaagtctttctattcttgttagtagttaagagggccttcattagttcatgaagagcagaggggtgcatagcagtccccccagaggtggagaaaaggaggctcatgggaggcgtgggtttgacattttacagttctccttacagacagtgtggaggtggacgtgaccacacaccagtgttaacccggcggctgagtgtacagactgttgaccagtcaagattgagaaagtctttgagagctaagcagcctgttcatttgacctaatttggtatatatttctcctggatttagagatcaaagcagtgattgtgctcatgtattttaaaccccatgagacaaaatggtgaaaatgtatttgaagtcttgagttagcttattctaggaatttcatttcctggtcttgctgggtgatctgtttctgattctttataatttattctgcttcactatgaactagttcagagatacctgttggtagatagcagggccagttttgagtactagtaaatgatatgatattagatggacctctggttgcttctaattggagttgcctaaaataaccctgtgacaagtatttgtgtaaataaagtgctggtaggcaatgtgagaccttcaggaagtgattcatatcactctgctgtttgtttaatttgggactccgttgcttagagaccatatctttgaggaggctgagtgtgaaatactagctgaatgccaagggccaggggctacctgatcaaattaatcacagccctgcttcttcactttagttttagaaggctccttatagtggcttggcagtgtttttattacaaaaattaatataaaaaacatataaatgaaggatctggctaatgatttaatttgaaatgtaaatatttacttaaatttgaattttcaggaaacatttttttttgatagaattggttatttctaccaggcattatatatatatatatatatatatatatatatatatatatatattaaacagactctttccttgtacccctcccatacccatttcttgagaatagacattgtttagatctggaaatcccctactctccccttctcctttctcccctgagggcctataaaaactgggacctctttcccctcgaggtcgactcctctacctctgcatgggatatgagtcgtccccagagctctggctttccccgaataaagcctcatgtggtttgcatcaagcttggtctatcgtgagttcttgggtgtccgctattgtcctgaggcctgagcgaggggctcctcttggagtctttcagttccagacaactggtgtcagctgtcatatggccgaggactggagctgtgtctgctcattaaagtctcatccaccctcaaatgtccagtttgtcttttggtttgttttttatattgagaactgaactgagagtctcacagatgctgggcagattacctgctgctaaaacacaccccaaatcccagtgattagacaaaccagtttgaagcagggtctccttaagtcgtctgggtagcttctggtttcagtccgctgtggttcaggagtaggttgggtttacaggcatggtccaccacacccatttcgtcacgtatttgtgcttttaactggattgttgggctattcctcaccgttttttttttttttttcctacgttctaacctggtctctgcctttgggtttagcttgtgtcccaccagactgtcctttgctaaatagtgacctcatgcagacaggagtggcaagttggattggaaattgccttacatcgttttggcaagagccgtgtttggggggtgtgggtggaggaaggacttgtctgaaggcctctatttcttctttactgagaatgctttcctgttgactcactggaaatcataacgaaaagcagaggaacactggaaaggcagctgccagcccagggctgtgctgctgctgggcagctgctgagggcctggggagacaccaggcgccaagattggtgagatttttgaggagagaaaatagaaggggattctggtattattgtgaaaggtaatttttcaaaaagtatagttatggcccagattgaacttttcttttttaattcaaaaccagagtgtgcctggctgtggtacataattcagaggggatgggagatccagagaagaaaaagcccacctgtctcctcggtcctgtttctcctaccctgtgccatcttttccagttagatggctgttagcattgtcccctgtgtatgccatatgtattataaatatttattccacgttaccctttacacttttatttttgtaaggtgtttatagtaatagcatcttaagacatgtttgaatttattaatcttattttttagcttctgaagtcctcttcaggccattttcatacagtcctagtatatatatgaaattatagaaaatcatttgagtttggagagatggctaaacagttaagagcactaattgttcttccataggacctgaatttgattcctggcacccatactgggtggctcatagttgtcttaattctactttcctgggcatgactcctttggcctcttagatgcctgtaatgatcttgcccatgtgtacttcacaattaatgaaagcaaaataatagcaaaaagcaaaaagaaaaaaaaaaaaaaaaggaggggggtgttgttcaatgtagccatgttgggaagggagacaaagaaagctagcaccacggttcctaaagtcctaaagtccgtcctcaaagggtctgccctaaaggtaggaagcaagatacataactaagcagtccaataagatgtggtccagcccaccatctcagctccaagcctcctgcagggtcatctgaggggcgccagatatttttcctggaaacatgtggatgcccccagggtggcattgtttcctcttttagcaggaaggagtcctgggaactctccagtttcttggggtccattctttcagtaatctgacagccaaagatggagcacacacctctctttaagagcatatcctgctaaacaggttcattacatactcatacatacacacagctaaaaatcacccaaaactaagtcttaaaaatactcccttatggtttcctccccttctcccttcagtaatggagcttgaacacagggcctcgaccatgctaggcaagtattctgctgggctttacttccaggcgagcccctgcctaatagtgttttaaaatatatatatacatgtatatgtagcatcacttaatatttacatgtgtattataatatattaaatatgaatgtatgtaatatatatatacatacacacatgtaacatgtaagtgataaaactggacatgtgtatatatgtgtacacacatatatgcagcgttttaacatttcatttaactctttgattcatttaggattttggcatgaggacttgggtagatatcttatttattttgttttgtttgaggcttggtctcactatgtagccctgggtggcctaaaactaactcactgtgtggaccaggctggccttgcactcagagattcacctgcctctgcctcctgaatgctgagatcaacagtgtgtacccgtgtgtgtgtgtgtgtgtgtgtgagagagagagtgtgtgtgtgtgtgtgtgtgagagagagagagagagagagaggatctaaatgaaagactttcactgtttgggaaatataatcgctgggctgttgcccatcatctttaggacactgtttttgtcaattacatgatctcatgtagccaaggctactcctggttctcctacttgtaccacctaagcactggaactacaggtgtgtgccgtatgcctagcttcttgaggcactgtaaaggacagagttgtgagttctaagagttaggattgcaaatgtactaatcctaattatttcaaacaaaaagaaaacatatcacaaaatctgatctagtgaactaatttctgacaaaatacaggagtggcaaaattccagggtacattatcagatagctgtcttctgaggacttagtaagaccagaatgacatgatgctaggagccaccctggctcctcactgtggactccttcggagagccatgctgcagaaacgtctactcttgaacagggtcaccacattggtgagtcagaaaaacatgtaaagtctagagtgtagcaaggcatttgcaagtgtgtcttgtgatactttgcagagagattggttaaatatgaattagatttcagtgtaattaagatgatttatagctgcctgagtaaaccagatttaaaagggcccttagaggggcgtggctgctagagggatataggtttcttttagggtaatgaaagtttctgggactatattgtaatagtggttgtacaacatagcgagtataacaaaccaaaaacaccacattgcttatggttaaaaagggtgaacttgcaaagtctggctcagaaaaagagcgattggttttgtttggttttgcttttgagatctgtgtagctcacaccagtcttccatgtgttgtgcactgaggatgggtgaccttggccttctggtttttctgtcactgtctctccagtgattgagagctaagcagggcttcatgtgtgtcagaccagcagtctaccaactgagctgcgtacccagccccggcttgtttgttcctttggtttttttgagataggatcctatgtaacccaggctggcctcagactccttgtacacttagaggatgaccttgaactcccgatcctctttcctctaccttcctagttcaggaattacaggtacgagccacctgtcatccctcccagctctagttgctggattttaacgcaacggaagctctttagggcctcttctcacaagggatgtgccagtcaaatttggactgctagagaagtggttaacacaacaaactgtgtttaaaatacaccaggttaccacagtgtaataggataatggtttacgttgtggtagaaaaggtctaactgcagagtaaaagagaagcagcattagtaggaaaagcaaacgacatcagagatacttgttaaccattaagtctggtgacctgcatttgacccttggaagcactgtaaaggtggaaggagagagctgccccagacctcccatgtgcattgtggcctgggatacacatacgtacaataattgcaaattaaaaacaaatcacgaggtggacaggacagcacccaagggatgatgtttgaggttgacctctggccttcacacacatgtgcaagcgtgtgcagatggaccctttctaagagcacatgcacaaagtcggagccactgtgggaacccacgttgtaggagactttcaaacacagatccacagttccagggaagcttcttcctgtgctctaacccatttctgcagtta

SEQ ID NO: 1596 - DNA, 6124 bp, Mus musculus
agcgacagcccgcgcactgggcaggagttactgctgctacggtcgcccgcgtcttcaaggtctctgcgcttcctcaccggagacctggactcggccgccatgtccgccgcggaggaggttgatggcctgggtgtggtccggccgcactatggctccgtcctggataatgagaggctcactgcagaggagatggatgagcggagacggcagaacgtggcttatgaatacctttgtcatctggaagaagcaaagaggtggatggaagcatgcctaggtgaggacctgccgcccaccacagagctagaggagggccttagaaacggagtctaccttgccaagctagggaacttcttctctcccaaagtggtgtccctgaagaaaatctatgatcgagaacagaccagatacaaggctaccggcctccacttcagacacacggataatgtgattcagtggctgaatgccatggatgagattgggttgcctaagattttttacccagaaaccacagatatctatgaccggaagaacatgccaagatgcatctactgtatccacgccctcagtttgtacctgttcaaactgggcctggctcctcagattcaagacctgtatggaaaggttgatttcacagaagaagaaatcaacaacatgaagatcgagctggagaagtacgggatccagatgcctgccttcagcaagatcgggggcatcctggctaatgagctctcagtggatgaagctgcgctacatgctgctgttattgctattaatgaagcgattgatcgcagagttgcagctgacacttttacggctctaaaaaaccccaatgccatgctcgtcaatcttgaagaaggcctggctcccacgtaccaagacgtgctttaccaggccaagcaggacaagatgacaaacgctaaaaacaggacggaaaactctgacagagaaagggacgtttatgaggagctgctcacacaagctgaaatccaagggaatgtaaacaaagtcaacacatcttctgccctggccaacatcagcctggctttagagcagggctgtgcagtgaccctgctcaaggctctgcagtcactggctctgggcctccgagggctgcagacccagaacagcgactggtacatgaagcagctacagagtgatctgcagcaaaagagacagagtggccagactgaccccctgcagaaggaggaggtacaggccggagtggatgctgccaacagtgctgcccagcagtaccaacgacggttggcagcagtggcagcaatcaacgctgccatccagaagggcatcgctgagaagaccgtgttggagctaatgaatcctgaagcccagctgccccaggtgtatccatttgcagctgatctctatcagaaggagttggccaccctgcagcagcagagccctgagcatagcctcacccatcctgagctcactgttgctgtggagatgctgtcatccgtggccctcatcaacagggcgctggagtcaggagacatgaccactgtgtggaagcagctgagcagctcagttacgggccttaccaacatcgaggaagaaaactgtcaaaggtatctcgatgagctgatgaagctgaaggctcaggcacatgccgagaataatgcatttattacatggaatgacatccaggcgtgtgtggaccatgtgaacctggtggtccatgaggagcatgagcggattttggccatcggcttgattaatgaagccctggatgaaggggacgctcagaagactctgcaggccctgcagatccctgcagccaagctcgagggcgtccttgcagaagtggcacagcactatcaagacacgctgatcagagcaaagagagaaaaggcccaggaaacacaggatgagtcagctgtgttatggttggatgaaattcaaggtggaatctggcagtccaacaaagacacccaagaggcccagaggtttgccttaggaatctctgccatcaatgaagcagtagacagcggtgatgttggcagaaccctgagtgccctacgttctcccgatgttggcttatatggagtgatccccgaatgtggggaaacgtaccagagtgaccttgctgaagccaagaagaagagactggcagcaggagataataacagcaagtgggtgaagcactgggtgaaaggcgggtaccattactaccacaacctggagacgcaagcaggaggatgggctgagcccccagactttgtgcagaattctgtgcagctttctcgagaggagatccagagctccatctctggagtaaccgctgcatataaccgagagcagctttggctggccaacgaaggcttgatcaccaagctgcaagcctgctgccgtgggtacctcgttcgacaggaattccgatcccggatgaattttctgaagaaacagatccctgccatcacctgcattcagtcacagtggagaggatacaaacagaagaaggcatatcaagatcggctggcttacctgcactcccataaagacgaagttgtgaagattcagtcccttgccaggatgcatcaagctcgaaagcgctatagagatcgcctacagtatttccgagaccatataaatgacattatcaaaatccaggctttcattcgggccaacaaagctcgtgatgactacaagactctcatcaatgctgaggacccgcctatgattgtggtccgaaagtttgtccacctcctggaccaaagtgatcaggacttccaggaggaacttgatctcatgaagatgcgcgaggaggtcatcaccctcatccgttccaaccagcagctggagaacgacctcaacctcatggatatcaaaatcggactgctggtgaagaacaagatcacgctgcaggatgtggtttcccatagtaaaaaacttaccaaaaaaaataaggaacagctgtccgacatgatgatgataaacaagcagaagggcgggctcaaggctttgagcaaagagaagagggagaagctggaggcctatcagcatctcttttatctcctgcagaccaaccctacctatctggccaagctgatctttcagatgccacaaaacaagtccaccaaattcatggactctgtgatcttcacgctgtacaactatgcatctaaccagcgggaggagtacctgctgctgcggctcttccagacagctctgcaggaggagatcaagtcaaaggtggatcagattcaagaaatcgtgacaggaaaccctacggttattaagatggttgtaagtttcaaccgtggtgcccggggccagaatgccctccggcagatcttggcccctgtcgtgaaggaaattatggatgacaagtctctcaacatcaaaaccgaccctgtggatatttacaagtcttgggttaatcagatggagtcgcagacaggagaggcgagcaaactgccctatgatgtgacccctgaacaagccttgtctcatgaagaagtgaagacgaggttagacaactccatcaggaacatgagggctgtgacagacaagttcctctcagccatcgtcagctctgtggacaaaatcccttatgggatgcgattcattgccaaagtcctgaaggattcacttcacgagaagttccctgacgctggtgaggacgagctgctgaagattatcggtaacctgctttactaccgatacatgaacccagccatcgtcgctcccgatgccttcgacatcattgacctgtcagcagggggccagctcaccacagaccagcgcagaaacctgggctccattgccaagatgctccagcacgcggcgtccaacaagatgtttctgggcgataatgcccacttaagcatcattaatgagtatctctcgcagtcctaccagaaattcagacggtttttccaattggcttgtgacgtcccagagctgcaggataaatttaacgtggatgagtactctgacctagtcaccctcactaagccagttatctacatctccattggcgaaatcatcaacacccacactctcctgttggaccatcaggatgccattgctccagagcataacgaccccatccacgaacttctggacgaccttggggaggtgcccaccattgagtcccttataggagaaagctgtggcaattcaaacgaccccaacaaggaggctctggctaagacggaagtgtctctcacgttgaccaacaagtttgacgtgcctggtgacgagaacgcagagatggacgctcggaccatcttactgaatacaaaacgtttaattgtggatgtcatccggttccagccaggagagaccttgactgaaattctagaaaccccagccaccaatgaacaggaagctgaacatcagagggccatgcagagacgggctatccgcgatgccaaaacccctgacaagatgaaaaaatcaaagcccatgaaggaggataacaacctcagcctccaggagaagaaagagaagatccagactggcctaaagaagctaacggagcttgggacggtggacccaaagaacagataccaggaactcatcaacgacattgccaaggatatccggaatcagcggagatacaggcagaggaggaaagctgaattggtaaaactgcagcagacgtactcggcgctgaactctaaggccaccttttacggcgagcaggtggactactacaagagctacatcaaaacctgcttggataacttggccagcaagggcaaggtctccaaaaagcctagggaaatgaaaggcaagaaaagcaaaaagatttctctgaagtacacagcagcgaggctgcatgagaagggcgtccttctggagattgaagaccttcaggcaaaccaatttaaaaatgttatcttcgaaattggtccaacagaagaagttggagactttgaagtaaaagccaagttcatgggagttcagatggagactttcatgttgcattatcaggacttgctgcagctacagtatgaaggagttgcagttatgaaattatttgatagagctaaagtgaatgtcaacctcctgatcttccttctcaacaaaaagttctatgggaagtaatgggtcgctcgccgcccagaagagttaacaaaaaacggcagcacctcacggctgtctttctaggatcctccattattccttagaagcaaggacctggtccagtggcggtgcctcagttcacactccctctgacggacggacggacgtcagtgccctctcccttctccttgtgaagccataagcctgacttcccctcagccctgctccctcattttctctcatcatgtaggaaagagtgggaccccctcccaacccctttctgttaaagcctcctaagtggtcattactactttgtagacattggtatttgttttacttagcaataagaatggtgaaattcaaattctcgtttagaagtgaaagctgtcaggttgatagcaagcatgcacatcaaattcaccagaagtacaacccatcggcgcagtcagaggatggagtctgatgtcttccggctgctgcctttgtgggcagagctaatccaagttactgttctctgttcaaatgaagcagcttcaggagaaaaagagcaattacttttgaattctccaataaatctggacaatgccgttagcgaagagcccttcctggtgaaggcaaacccatggtcagagcaggccatttagagactgagtgggcggggcacttaccatcccttccacaaaggatagcttcccccagctcaaaatgtaactgtttctaaactgtattccaagagtgccttaccaaagtataaatttatttcttaaaatgtgagtaataggaattttaaagatttatataatgcttttgaacactctgagaaagggttgttttttttcattgggttaatctgtatatctgaattcttgaagcttttctctagcctacagtagggtcgatctgccgagctgctgaataaccctgcttgattttagcaacaagagacaatccatgccatgcttttatcctgagaaacctggacccttaggctctgactaacaaagacagttcagctccagacactgaacttggaatcctttgtctttggattaaaagtcataaacttaaaaaa

SEQ ID NO: 1597 - DNA, 4974 bp, Mus musculus
atgtccgccgcggaggaggttgatggcctgggtgtggtccggccgcactatggctccgtcctggataatgagaggctcactgcagaggagatggatgagcggagacggcagaacgtggcttatgaatacctttgtcatctggaagaagcaaagaggtggatggaagcatgcctaggtgaggacctgccgcccaccacagagctagaggagggccttagaaacggagtctaccttgccaagctagggaacttcttctctcccaaagtggtgtccctgaagaaaatctatgatcgagaacagaccagatacaaggctaccggcctccacttcagacacacggataatgtgattcagtggctgaatgccatggatgagattgggttgcctaagattttttacccagaaaccacagatatctatgaccggaagaacatgccaagatgcatctactgtatccacgccctcagtttgtacctgttcaaactgggcctggctcctcagattcaagacctgtatggaaaggttgatttcacagaagaagaaatcaacaacatgaagatcgagctggagaagtacgggatccagatgcctgccttcagcaagatcgggggcatcctggctaatgagctctcagtggatgaagctgcgctacatgctgctgttattgctattaatgaagcgattgatcgcagagttgcagctgacacttttacggctctaaaaaaccccaatgccatgctcgtcaatcttgaagaaggcctggctcccacgtaccaagacgtgctttaccaggccaagcaggacaagatgacaaacgctaaaaacaggacggaaaactctgacagagaaagggacgtttatgaggagctgctcacacaagctgaaatccaagggaatgtaaacaaagtcaacacatcttctgccctggccaacatcagcctggctttagagcagggctgtgcagtgaccctgctcaaggctctgcagtcactggctctgggcctccgagggctgcagacccagaacagcgactggtacatgaagcagctacagagtgatctgcagcaaaagagacagagtggccagactgaccccctgcagaaggaggaggtacaggccggagtggatgctgccaacagtgctgcccagcagtaccaacgacggttggcagcagtggcagcaatcaacgctgccatccagaagggcatcgctgagaagaccgtgttggagctaatgaatcctgaagcccagctgccccaggtgtatccatttgcagctgatctctatcagaaggagttggccaccctgcagcagcagagccctgagcatagcctcacccatcctgagctcactgttgctgtggagatgctgtcatccgtggccctcatcaacagggcgctggagtcaggagacatgaccactgtgtggaagcagctgagcagctcagttacgggccttaccaacatcgaggaagaaaactgtcaaaggtatctcgatgagctgatgaagctgaaggctcaggcacatgccgagaataatgcatttattacatggaatgacatccaggcgtgtgtggaccatgtgaacctggtggtccatgaggagcatgagcggattttggccatcggcttgattaatgaagccctggatgaaggggacgctcagaagactctgcaggccctgcagatccctgcagccaagctcgagggcgtccttgcagaagtggcacagcactatcaagacacgctgatcagagcaaagagagaaaaggcccaggaaacacaggatgagtcagctgtgttatggttggatgaaattcaaggtggaatctggcagtccaacaaagacacccaagaggcccagaggtttgccttaggaatctctgccatcaatgaagcagtagacagcggtgatgttggcagaaccctgagtgccctacgttctcccgatgttggcttatatggagtgatccccgaatgtggggaaacgtaccagagtgaccttgctgaagccaagaagaagagactggcagcaggagataataacagcaagtgggtgaagcactgggtgaaaggcgggtaccattactaccacaacctggagacgcaagcaggaggatgggctgagcccccagactttgtgcagaattctgtgcagctttctcgagaggagatccagagctccatctctggagtaaccgctgcatataaccgagagcagctttggctggccaacgaaggcttgatcaccaagctgcaagcctgctgccgtgggtacctcgttcgacaggaattccgatcccggatgaattttctgaagaaacagatccctgccatcacctgcattcagtcacagtggagaggatacaaacagaagaaggcatatcaagatcggctggcttacctgcactcccataaagacgaagttgtgaagattcagtcccttgccaggatgcatcaagctcgaaagcgctatagagatcgcctacagtatttccgagaccatataaatgacattatcaaaatccaggctttcattcgggccaacaaagctcgtgatgactacaagactctcatcaatgctgaggacccgcctatgattgtggtccgaaagtttgtccacctcctggaccaaagtgatcaggacttccaggaggaacttgatctcatgaagatgcgcgaggaggtcatcaccctcatccgttccaaccagcagctggagaacgacctcaacctcatggatatcaaaatcggactgctggtgaagaacaagatcacgctgcaggatgtggtttcccatagtaaaaaacttaccaaaaaaaataaggaacagctgtccgacatgatgatgataaacaagcagaagggcgggctcaaggctttgagcaaagagaagagggagaagctggaggcctatcagcatctcttttatctcctgcagaccaaccctacctatctggccaagctgatctttcagatgccacaaaacaagtccaccaaattcatggactctgtgatcttcacgctgtacaactatgcatctaaccagcgggaggagtacctgctgctgcggctcttccagacagctctgcaggaggagatcaagtcaaaggtggatcagattcaagaaatcgtgacaggaaaccctacggttattaagatggttgtaagtttcaaccgtggtgcccggggccagaatgccctccggcagatcttggcccctgtcgtgaaggaaattatggatgacaagtctctcaacatcaaaaccgaccctgtggatatttacaagtcttgggttaatcagatggagtcgcagacaggagaggcgagcaaactgccctatgatgtgacccctgaacaagccttgtctcatgaagaagtgaagacgaggttagacaactccatcaggaacatgagggctgtgacagacaagttcctctcagccatcgtcagctctgtggacaaaatcccttatgggatgcgattcattgccaaagtcctgaaggattcacttcacgagaagttccctgacgctggtgaggacgagctgctgaagattatcggtaacctgctttactaccgatacatgaacccagccatcgtcgctcccgatgccttcgacatcattgacctgtcagcagggggccagctcaccacagaccagcgcagaaacctgggctccattgccaagatgctccagcacgcggcgtccaacaagatgtttctgggcgataatgcccacttaagcatcattaatgagtatctctcgcagtcctaccagaaattcagacggtttttccaattggcttgtgacgtcccagagctgcaggataaatttaacgtggatgagtactctgacctagtcaccctcactaagccagttatctacatctccattggcgaaatcatcaacacccacactctcctgttggaccatcaggatgccattgctccagagcataacgaccccatccacgaacttctggacgaccttggggaggtgcccaccattgagtcccttataggagaaagctgtggcaattcaaacgaccccaacaaggaggctctggctaagacggaagtgtctctcacgttgaccaacaagtttgacgtgcctggtgacgagaacgcagagatggacgctcggaccatcttactgaatacaaaacgtttaattgtggatgtcatccggttccagccaggagagaccttgactgaaattctagaaaccccagccaccaatgaacaggaagctgaacatcagagggccatgcagagacgggctatccgcgatgccaaaacccctgacaagatgaaaaaatcaaagcccatgaaggaggataacaacctcagcctccaggagaagaaagagaagatccagactggcctaaagaagctaacggagcttgggacggtggacccaaagaacagataccaggaactcatcaacgacattgccaaggatatccggaatcagcggagatacaggcagaggaggaaagctgaattggtaaaactgcagcagacgtactcggcgctgaactctaaggccaccttttacggcgagcaggtggactactacaagagctacatcaaaacctgcttggataacttggccagcaagggcaaggtctccaaaaagcctagggaaatgaaaggcaagaaaagcaaaaagatttctctgaagtacacagcagcgaggctgcatgagaagggcgtccttctggagattgaagaccttcaggcaaaccaatttaaaaatgttatcttcgaaattggtccaacagaagaagttggagactttgaagtaaaagccaagttcatgggagttcagatggagactttcatgttgcattatcaggacttgctgcagctacagtatgaaggagttgcagttatgaaattatttgatagagctaaagtgaatgtcaacctcctgatcttccttctcaacaaaaagttctatgggaagtaa

SEQ ID NO: 1598 - DNA, 28670 bp, Homo sapiens
ccaagggaaggatgcggaatgtctgttttctactaagggcttctgctgggcctttccaatgtccagtttgagttggtctgggacctggcctccgcaaacaccctgcaggctccggccgccggggatgaggtggaagactgggcagaagagaggccgcaaaggcccgagggctgagctgctctgcgctggggaggggcgaagtgccagagcgcgggagacctcatggtgggcaccaggctgctccgcggtaggtgggtgaggccaggagattcacatctgcagatgccacagtgaggatacagcatttagatccctcggctccaaacaggcggttccgggggaccggtagctggggaattgggtttagcactttccaacgcttggaactggacatccacggctccgagtcctttgaggtcttgctcgggactacgtttcccagaaggctaggcgataattgacagctctatcagcctatggacagagaaaaattctagccatggaaactgaaaagccaatagcaagaggatgggggcggtactttccggccgctggctgtcgaagccggagtcccacctgtgtccccacagccctgtcacgaatcccggtcgggttctgggaggcacagcctcggggttgcgggccgggtgcggctcggcggtggaggactcacttcctgctccatccccggctgggccctggggcggtgagtgattcaaggagggagaccgcggcggcagcggcgcgctgctgaggggcgtggagggggcttgcccgccacccagacgttttctcagcggggttcccgcgctggcctttgggagcccccgggtcttgctgggctgtgggagaggtagctgtggtctctataccgtcggcgggataagtcattctcttaatcagttttcttgcttctcgatggtggtcccagggtttcagctgatctgtgaccctctgaccgccgcaccccggttagggcgcgagcaccgagaagaagaacggggttcggccccacgcgtgcagtcatgttcctattaataaacccggtgaacgcactggagcttctcacagtggcacttagtcacagcccctcagcgctgtggggcctttgaggtcacctgtgcatggggaaagggacgggctgggaaacagggtttctataaccgtggctaagacgtctcccctcctcagtggcgctgtctccagcaagtgggccctgcagctgtgttttgtaatgaatgtagaaataaaaattatactcaaaactcttttttttttttagacggaatttcgctcttgttgcccaggctggaatgcaatggcgctatctcctttcactgcagtctccacctcccgggttcaggcgattctcctgcctcagcctcccaagtagttgggattacaggcgtgtgccaccacacccggctaattttgtattcttagtagagacagggtttcaccatgttggccaggctgatctcgaactcctgaccccaggtgatccgcccgtctcgtcttcccaaagtgctgggattacagtcatgagccacagcacctggccaatactgaaaactcttattacaatttttactttctaattacattattgttgtttgttaaagttttaaaccagagagatggtttttagatccttaaaaactcaatactttataaatgaccaataataatgtctgtaaatacaaaaatatttcccccaaaagtgtgtgtgtgtgtgtgtgtgtgtgtgtgtgtgtgtgtgtgttccagtagtaaataggtgatttgtagtgggacaaaagatgtgaaagagtaaaacttcttcaccacagtctggtccttcctcccttgaaatgcaatattctttgtagtgggtggtcatgctggctgcattttttttttttttaagggagagacaggggctcactctgttgctaggctggggtgcagtggcgccatcatagctcactgcagcctggaactcctgggctgaagtgatcctcccacttcagcctcctgagtagctgggaccacaagtgcatgccaccatgcctggctgatttttaaaagttctttgtagagaaagaggtctcaatatgttgctgaggctggtttattggaaactttttaagggaaaaaacattatcttaatttctatgtgactcctatgcctggcaacatattaattgttgaataaatgactgatccatccagtaattcactcttgactatcctccaaaaagtaatgtttttcatgatattgctgtcgatttattaatatattaatgattggtttcagcccctaagagttgtgttttgtgcttattcccactttcacttatttttacaacctatccatgtcttcttttttttaaaaaaaaaatgtctttttcagtcttatttctgactccattaagatcttgaaatagaatggtatccaacacagttccctttggggttctgtataatctgtcccttgaggttgacaccaaatctgcaagccaagaagttagctgctcccataactaatatgagtatagttaaggccacaatttccttgcttgctgaggaaaatgaagttggggagaatcaaaagctttccagaaatcaaattacacctgccaactctctcctttgtttaccttgttcatcgtggacaatttgttcctcaaaaagtcaatgtgtctaaaagactgggttctgtcgatgtgtttgggaggcctaggcctctcttagtaatgggaaagttggccaggagaagacgtatgtaaaaacagacttagaaaagcacccctctgtggttgacagaatttacctcaggaccattctggtcaggtgtggggggttgtttgtgtacactggtggccattttttggctttcagacaatggtgagaatatctagggagctactgatgcacattgaggtctcttgctttaggaactgatgacgcttgataatgtggctggggacttcagggaagagtgggttacctggacactgcttagagaatcctctccaggaatgccacccagcacagttagaagaatgggctctcaaagggtaagaatgctactctcctttatttcatttatttatcttgttttttttgagacggggtctcgctctgtcatccaggctggagtgcagtggcgcgatctcgattcactgcaatctgtgcctcctgggctcaagcgattctcccacctcaacctcctgagtagctgggatcacaggcatgtgccaccatgcctagctaattttttgtgtttttagtagagacaggattttgctatgttggcaaggctggtctcactatgctgtccaggctggtctcaaactcctgagctcaagcaatccactggcctccgccttccaaagtgctaggattatgggcgccaccatgcctgaccactgctctcctttaatttgagacttagatatttggagagggcccaggtctgaggagtttctggtatgttggcatcttagagctccagacctctgtaagattaattgttgcctccttgggagaaaaacaattacttccttatgcattttatggtttgcaaatgtctttgctatttattgtccttttaatatctcatcataactttttgacttatgtattactatcccccttttccagcctgggttggactctcacctctgccacttaacttctgagacttctgaggtctttgtggaaaaggaggtaattttttctgtcacttaaaaacaggctgggggcagtggctcacgcctgtaatcccagcactttggtaggctgaggtgggcggatcataaggtcaggagttcgagaccagcctggccaacatgatgaaaccctgtctctactaaaaataaaaaaattagctgggtgtgatagcgggcgcctgtaatcccagctactctggaggttgaggcaggagaattgcttgaacctgggaggtggaggttgcagtgagctgagaccacgccattgcactccagcctgggcaatagagcaagactctgtctcaaaaaaaaaaaaaaaaaaaaaaacaaggctgggcgcggtggctcatgcctgtaatcccagcactttgggaggccaaggcagggagatcacaaggtcaggagatcgagaccatcctggctaacatggtgaaaccccgtcttactaaaaatacaaaaaattagccaggcatggtggtgggcacctgtagtcccagctactcgggaggctgaggcaggagaacagcgtgaactgggaggcggagcttgcagtgagccaagatcatgccactgcactccatcctgggcgacagagcaagactccatctcaaaaaaaaaaaaataaataaaaaaaaccaaaaacacctccaatgctctttctcaaatatcatggctacccttcctcctgctttatatttttagtagagatgggttatctccatgtggtcaggctggtctcaaactactgacctcaagtgatccgctcacttcggcctcccaagtgctgggattataggagtgggcccagctctaatttttgtatttttagtggagtcgaggtttcaccatgttggccaggctggtcttgaactcctgacctcaagtgatccgctggccttggcctcccaaagtgctgagattagaggtgtgagccactgcgcctggcctacttcatctattatacaagtaatgtatactcattcaataaaaagtcaagcaaaatgaaaacaaacatcatccctaatcccaccaatgaagagttactatcctaccagcatttttctaagcatatatacaattttaaaagaagcacaaaagaataatattgggattatgctgtatattcagctgtacattctttcttccatgttgtattgtgagtatatctttctttacatcacttaaaataaccacctagtattttgttttatggaatacaatattattttgttgatgaagtcaaacattagattgaaccatatatctgacctttttttaacctataaaaatagcaattgcctgagctacttgggaggctgaggcaggaggatcccttcagcacaggagttcgaggctgcagtgagctatataattattcctttgttgtgggacatttaggtcatttctaaactttcaccaggttgtgataaacatcttttagctcgttttttaaaaagtattttttattgaagtataattttatcattttcttagaattctcagaattagaattggtgggtcaaagaacagatacatttctaaggtatttaatactttgcaaaatgccttccaagaagattgaatcaattgatttattcccacaaacattatatgaaagtgcgcatttctttatattctacctttcacagtgggtattataatttaaagagtctgggcctgggtgtggcagctcatgtctataatcccagcattttgggaggctgaggcaggaggaccacttgagctctggagttccagaccagcctgggcaacataatgagaccctgtctctacaaaaagttacattaaccaggtgtaggggcttgtgcctctggtcccagctacttgggaggctgaggtgagagaatcgcttgagccaggagctcgaggatgcagttaactgtgattgtaccagtgctctccagcctgggtgacagagcaagagcctgtctcaaaaacaaacaaacacacacacaaaacacaaaaaaagagtctgggaaaaatagcaataatagttaacatttattgaagttttttttggagatggagtctcaatgtgttgcccaggctggaatgcagtggtgcaatctcagctcactgcaacgtccgcctcccaggctcaagcaattcccatgcctcagcctcccaagtagctgggattacaggtgtgcaccaccacacgtggctaatttttgtatttttagtagagacaggatttctccatgttggacaggctgctcttaaactcctggcctcacaagtgatccaactgccttggtctcccaaagtgctgggattacaggtgtgagctactgcacctggccaatggatcttattcttatcccaatttttttttttttttttgagatggagtctctctctgtcgtccaggctggagtgcagtggtgtgacctcgattcaccataacctctgcctcctgggttcaagcgattctcctgcctcagcctcccgagtaactgggactacaggcctgtgccaccatgcccggctaatttttagtagagacggggtttcactatgttggccaggctggtctcaaactcctgacctcgtaatccgcctgcctcggcctcccaaagttctgggattataggtgtgagccactgagcctggcctcttatccctattttattgatgaagacattgagacacagagtttaagtaactttcttaaggccacacagcttgtaagaggcaggatgatgactcagacccaggcagtgtgactcttgagtttgcactcattacctctacactatattgcctcagtgtatcattgttataatggaatttctttgattatagtgaggttaaacatttttcgtatatttacaggctacttaacaactgtttgtctttttctcatggcttttttgactgctgccattctgggaaaattttaaagcccaacattatagttaacttccttcattgtttctaagggtgaggtcatggaggcttggtttctgataaaatcctctccatatttagctttagccttgtaccttcagaaatggttattgtatttacttcagagtttctgtcacctgagtctggttttttttctttatgggaggaaaagggcttttttttcttaacattttggggaaatcaccgtgttttatcactgtaccatggctgcacttttttaatgacaccaaatacacgttagagctccccaggtgttcttccatacctaggcagggagtagggcttggattttgctcaggccttgtgtgattggctcagactcacatcctatgtttacattcctgtgtagaatttccaggcctagtgtaatctcccagccggagcagaaagaagagccatgggtcctaccactccaaaactttgaggcgaggaagatcccgagggaaagccacacaggtgagatgtgagtgctccccagtggaaggaaatctagcatttcagccttgtttagatgaagaatttggaatgctgccttagaattttgttcttactagcagacattttttttttttttttttttttgagacggagtctcgctctgtcgcccaggccggactgcggactgcagtggcgcaatctcggctcactgcaagctccgcttcccgggttcacgccattctcctgcctcagcctcccgagtagctgggactacaggcgcccgccaccgcgcccggctaattttttgtatttttagtagagacggggtttcaccttgttagccaggatggtctcgatctcctgacctcatgatccacccgcctcggcctcccaaagtgctgggattacaggcgtgagccaccgcgcccggccactagcagacatttaaatttgacttaatggtcagtagttgactaaataaagtcttcattttgattaagcatttcacttttgtctaacctatgtttttttttgagatggagtctccctctgtctcccagcctggagtgcagtgacacaatctctgctcactgcaacctccgcctcccgggttcaagtgattgtcctgcctcagcctcccaagtagctgggactataggcacccgccaccacgcccagctaattttcatatttttagtagggatggagtttcaccacgttggccaggttggtctcgaactcccaacctcaagtgatctgcctgcctcggcctcccgaagtgctgggattataggcgtgagccaccacgcctggcctaaacctataatatcttctaaagaaaccgcacaatattgacaatatgtggtctccgcttgaaggatatcaagattcatctggccatcttaaaatttaaaaagtttaggaattcacgtgttctgacagctcaatgaacctcaataaacttttcacaaagtgaaaacagagcggttgaattaagtgcagtctgctgcagaaacagggattttaatctttgtcactgctttctgatattccttcctgataactgataactttattctctgttacttacattaatttttcagactgtgagcatcaggtggcaaagctcaatcaggacaattctgaaacagcagaacaatgtggaacatcctcagaaaggaccaataaagatctttctcatactcttagttggggaggaaactgggagcaaggcctagaattagaagggcaacatggaacccttccaggagagggccagctggagtccttttcacaggagagggatttaaacaagctcctggatggatatgtaggagagaagcctatgtgtgcagaatgcgggaaaagctttaaccagagttcctatctcataagacacctaagaacccacactggcgagaggccctatacgtgcattgagtgtgggaaaggcttcaaacagagctcagaccttgtcacccatcgcagaacacacacaggagagaagccctaccaatgcaaggggtgtgagaagaaattcagcgacagctcaacactcatcaaacatcagagaacccacacaggggagagaccctatgagtgcccagagtgtggaaagacttttgggcggaagccacacctcataatgcaccaaagaacccacacaggcgagaagccctacgcgtgcctggaatgtcacaaaagcttcagtcgaagctcaaatttcatcactcaccagaggacccacacaggggtgaagccttacaggtgtaatgactgtggggagagttttagccagagctcggatttgattaagcaccaacgaacccacacgggagaacggcccttcaaatgcccggagtgcgggaagggcttcagagatagttctcattttgtagctcacatgagcactcattcaggagagaggcctttcagttgtcctgactgccacaaaagcttcagtcagagctcacatttggtcacgcaccaaagaacacacacaggtgagagaccttttaagtgcgaaaactgtgggaaaggattcgccgacagctccgccctcattaagcaccaacgaatccacaccggagaaagaccctacaaatgtggagagtgtgggaagagcttcaatcagagctcccactttattacccatcagcgaatccacttaggagacaggccctatcgatgtcctgagtgtggcaagaccttcaatcagcgttcccatttcctcacacaccagagaacgcatacaggagaaaaacctttccactgtagtaaatgtaacaagagcttccgtcagaaagcgcatcttttatgccatcaaaacacccatttgatttaggaagtagtctttggtgttcagctgctcccttgcacattttcattgctactgtcttcaagcaccccaaatagagaaaacctgggcgtcagtggctcaatttgggccctgatctattctccctctttcttgtctatgttataacagagaggataaacttaaagggtccaaataacggtccgaatacaaaaggcattccttcagtgtgtgactgactcttagggaaatgtgagtttaatagttgatgcccgccaggcgtggtggctcacccctgtaatcccagcacttttgggaggccaaggtgggtggatcacttgaggtcaggagttgagaccagcctggtgagcatggtgaaacctcatctctactaaaaatgcaaaaattagctgggcatggtggcacgtgcctgtagtcccagctactcgggaggccgaggcagaagaatcatttgaactcagaaggtgcaggttgcagtgagttgagatcatgccactgcactccagcctgggcaacagagagagactctgtctccaaaaaaattaaaaagttgatgcctagttactaaatgagaagtgagaaaaatgtggcctagagatcacatgttcaccacctagtacagtgcctggcacaacatagatgctcaataactaaatggtcccatcattattaatgattaatagttgaggtcttatataaaggctttaatgcagtacctggcccttaaaagacactcagtacaagattggtggcttttatcagtcttattactcaattagaaatttattagtgtagtccccccgccccaaactcagaacgtgaaagaaattagattggaactagaaggtttggggttggaatacacaaattgaataaaatggaaatgcactgccagttcagtgctgtgcaggcattagtcaccagaggtctcactgccatgacaaggccaaattatcgtagaggatgtttgcggtcttgtgacttggaggctgaaagaatttcagaagctcttttaaatggcagtgtatggcagtgtatctaccagaggtttgctgtcatctgacacagagaaaatatcctacaatgaacaagccagagggacctggtagaggactataaaattgtggaagcaaaattgctgagaatgtcaaatgatattacagggatcctccctggcatttagctgaaggaagcaactcttgttttctaatttgctgggtcattggccatttagttttaggttaatataattctctgatccttttagggccatccaggttatgcactagtacattcctacattcaattgaaataaattgagggacggcaagtgtgttggaaagaacaccgacttcattgagaaggtaaagtatttgagtcctggccctgacgcttaatttggccagactttcatcttctcccagcctcaagttttacctacctcacaaggttgttgtgaggatctaaaaatacacacacacacacacacacacacacacacacacacactttgttggttaactataaatgtaatatctctatgttataattctgttgctaatgtcttttttccaagaaaattttggctaatatttctttaggtattcctttttctctcatagtgagggattaaaaaaaaaaaaaactgttgaaaaattagggcgtaaaaatgctaaatgacatgactcatcatgggccacgtagttaacagaagagccagatttggctgcaagtcactagatttccagcctgcagtcctcctctgcaacaacagaccagctctgggatttgttacagtgcctgtgagacattacaggactggaggacccatattatatccattaaaccagtctgaatttggaaatgatggagggtgtagtctaagttgtagggagctttgcaagaacctgtgctggggtccttgatcctggtggaatgggggtggaggagtgagcgcaaatgcaaggggttaaggagggagctgggtagttatcactttttagagtgcaaagtggtggattaaaggtttcttttctttcattctcttccattatatggaatgccatctgagtgctgtggctcatgaaggatagaactcagctgataaccttacctcagtttttgaaagcatcattagataattgaccagaaaattttttttagttaatccagtgcagtggttctcaaactgtgagcccagtccagtagcatcagcattatctgggaactttttagaaatgcagattcaggccgggtgcagtggctcacacctgtaatcccagcactctaggaggccgaggcgggtggaccacctgaggtcaggagtttgagaccagcctggccaacatggcaaaaccccacctatactaaaaatacaaaaattatcccaggtgtggtggcatgtgcctgtaatcccaccaatttgggaggctgaggcaggagaatcacttgaacccaggaaaggaggctgcagtgagctgagatcacacatgctggagtgcaatggcatgatcttggctcactgcaacctctgcctctcaggttcaagcgattctcctgcctcagctcccggagtagctgggattacagatgcatgtcaccatgcccagctaattttatatgttaagtagagacggggttttcaccatgttgggccaggcgggtcttgacctcctgacctcaggtgatccacctgccttggcctcccaaagtgctgggattacaggcgagagccacctcacctggccacctatcactttgattttcatgttgtttggctatggtaaaatgtgagctctcgaagggcaatgtgagatttgctttgtggccctgccaatcccctccctcctccctgtcttcctgcccacccccccccactcccccgccagccatgagcagggaatatttcaatgctattgctgagagtggaggtaaccctttctatagttttcttttgtttctacctcatgactagatgattcactgcttgaacatgctccacacatccgttctttctcactccaaaattgaggtcatcaccaagccccattaattttacctcccagattcctctcgaacctatctgtcaaatctgtccatcttcactgccacccttcagtaccaaatgaccagtctcttacctgaattcctgtagcagcctccaaactgatcttcctgatatgatttttgctctgaaaaaactggtttcactcacagaaaccagagtgaacttttaaaatcctaaatcgaatcacatcacttctcagcagctttccattgcttttagaatgaagacccaaatccttacccaggcctaagaggcccttgtggttttgtcccctccccctccatcctcttgtgatatccccttccctctcccttgcctcacctcagcactcttgagttctctgctccttggtcatgccaaggttgtgtgctctttagacccttggtactaactgttccctctgcccagaatgttcctcgcccagtcctttgtgttgcctcctatttgtcaaccaggtttcagcctaaacctatctccttaggaagactttccctaactatcccatctaaattagtcaccctccatcacattatcctcttttttcatcaaagtccttacacctgtctggcaatttcttattaattgatttgtttttggtaaactccacgaaaggtgggagtcatttctcttgtttccattctttccacagcacttagaacagtgcctggcacatggtaggtgctcaatatgtgtttactggatgaattaatgagtgcatgctcatgggcaaggatctcattgtgctggaaaagcagcagagtgagacaaaactggacaggtgagtgaaggtcacaccaagaaggttcttagctgccaaactaaagggtttggatcttactctctggagaaaagggtgtagctagtggttttataggagaggagaggcgcgatccgcacttgagaaggtcaatttggccgctgtgtgtaggtcatattacggagaaaaaaactaaaggctttgagacaatccatgatgtaaagggcttagcacagtgcccagcacgcagtaggtctccagcgagtcgttatcaccaagcaccagggcaggcaccacaacaaaaagataagatccctaacccttcttttacctcgaaataattcctcctagaccctatcatcgcattccttctcttccccttttgtcaaacttccactcacatgtagatattctcagggttatcatgcctaggcctttttaatagggccacttaccctagcatgcttctacaactggaccctcaaaggtcttttagggctgagtgtggtggctcacacctgtaatgccagcattttgggaggccgaagccagaggactgcttgagcccagaggttcaagaccagcctgggcaccatagccagaccctgtctctacaaaaaatagtttcaacaaattagccaggcatggtgatgtgcgcctgtcatcccaagtacttgggaggctgaggtgggaggattgcggattgcctgagcccaggagttcaaggctgcagtgagctgtgatcataccaccgtactccagattgcgtgacagagctagaacttgtctcttaaaaaaaaaaaaagacttaatttccacatctgaaggcctcttgttagtcttcttctgattcaacaactctttactgtttgatgccatttacatatgtttattattttttagagatggggtctcattcttttgctgaggctggagagcagtggtgcgatcatggctcactgcagcctcaacctcccagactcaagcaatcctcctgtctcagcctcctgagtaacagctaggactacaggcacatgccaccaaacccggccttttaaaatttttggtagaggccagatgtggtggctcatgcttgtaatcccagcactttgggaggtccaggcgagtggatcacctgaggtcaggagtttgagaccagcatggctaatatggtgaaaccccgtctctagtaaaagtacaaaaattagccaggcgtggtcgtgggcgcctgtgatcccagctactcgggaggctgaggcagcgagaatcacttgaacctgggaggcggagcgttgcagtgagctgagatcgtgtcattgcactccagcccagctgacaagagcgaaactccatcgcgggggatgataataataataataataataactttgctagagacagggttcccctatgttgcccaggctggtcttgaactcctgacctcaagcaactctcccaccttggcctcccaaagcgctgggattacaggtgtgagctactgcaccaggcccatatgcctttttaaaaaaattatcttttccattggtgactatgaggttgagagatgattctcctacatttctggctgctcctcttcaagtaccttccctggctcctctggatttttttgttttgttttgttttgttttgttttgtttttgagacaaagtcttgctttgttgcccaggctggagtgcagtggcaggatcttggctcaccagctcactgcaacctccacctcccaggttcaagggattctggtgcctcagcctccagagtagctgggactacaggcccagctaatttttgtacttttggtagagatgggggtttcaccaggctggtcttgaactcctgcctcaggtgatctgcccacctcggcctcccaaagtgctgggattctaggcatgagccaccgcgcctggcctggctcctcttcttcttccactcagatatgcctgaccctgtcaacactttggttgaggtcttctttcttctttcttttttgctccgcacatttagcttatgacttcaaccatcatttctcagagcatgggtctggctcaacctctctcctgaatttcagacctacaagtctagctacttggtggagacctccccagaatgacctgctgcttcccaaaagcagactctccaaattacagtcagtatctcccccggaagcattcccccaggcatttctctttctgccttcaattccccattctcctacattgccttgccagaagcctgctggtcagcttggatttctttttgtccttttttttctatattttgctggtgcctagtcatgtagttgctgcctctacactttctcttctttaaaaaaaattattaaagcaccacgtgcttgttgtaaacatttccagaaaatacagaagtgctcaaagtgaaaaaatggaaatgccttgtcccttcctcattccctgccctaacctcacgccccagattcagctatgtaatagtctgtcatgccaagtcttatttccagctcctcttttccatccccactgccatcatctgaactaaacggattgttttccatctggtctccttggcttttcctttcagtgcagctcaacagacattaatcaagtgccttccacacaccaaagtcctaccctagatcctagaggttcagagacaagtaagatagttaaagagatccacattccagagctgtttaactttgggcaagttacttaatctctctgacccttacttccttatctgtaaaatgatgctaatcccagcacctttttcatgggtttggacgagcattaatgagatgatccatgtaaaactctttgtactaactacctggtacactgtatctgctccataaatgtcagtgacaacaatgataataatgacaatgtttggaggagtttatagcttaatggagagacttaaagcataagaattatctaggcgaagaatgatgagaaaatatttttggaaaaggaaaacaaacagttctactaaaattaaaaggctgatgtagagacttgggaaactgggaggtaagagctcggactgtgtcctctaagacagtaattcccgaagtgtgagcaaaagtccacctgcatcagtcttacttggggtgattgctcaaaatgaggatttaatggctgcacctccgagcaagttggtaatttacatatcggaatgctatccatcaaggaaaatgggcagactacagttacatgcatcaacacagacaagcttcaaacaatattgagtgtaaaaagcaagacatagaaatatatatttagtaagagtaaaaatacagtaaaggtaaaaaagaggcaaaactaaacaatatattgcttaagcaataaggatacacaaactaatgaaaatcaaaggatttactaatacaaacttcagtatagtaattaattggaatgggagagaaagatgcaaagtttctatttctttttttgttttgttttgagacagtgtctcattctgttgccaaggcaggagtgcagtggcaggatctcagatcactgcaagctcagcctcctgggttcaagtggttcttctgcctcagcctcccaagtagctgggattacaagcatgcaccaccacacccagctaatttttgtaattttagtagagatggagtttcaccatgttggccaggctggtctcgaactcctggtcttaagtaatccgcccacctctgccatcaaagtttctgtttcttaagttggctgccgagtacacaggttttctttgtaaaataattatttaaattgttaatatgcattacttatatgcttttcatttacaatgtatttcacaagaaaaataaaacaaagcaaataagaaaacagaacacttctccagagattgatctttttcactcaaatctcattgagttatactgagggggaaaaagagtaatctgagtgcctgggccctgaacagacacactagatcagttccttcattcccactcaaacacatgcacacacacgcacaaacacacattttcttatatttccttcagcaaaccccccgccccaccaaccaaccccaaaacaccctctgctcctttatgtatataaattagagcagataaatgtccagaagattataggccatctttctataaacagccaatcttggacctggtgtctgaatgggggatgccctgctgcattaaagatgctcatgtgaacattttgttgtttcccagaaaaaaagtttccacattttagattattttcacagggtgagaacaattttacacctcccttacttgctgcagaatcttttttttttttttttttttttttttgagacaggtcttgctctatcactcaagctggagtgcagtggcacgatctcggctcactgcaacctccgcctcccaggttcaagcaattcttctgcctcagcctctcgagtagctgggattacaggtgcgcaccaccatgcccagctaattttttgtatttttagtagagatggggtttcaccatgatggccaagctggtttcaaactcctgaccacaagtgatccgcccacttcggcctcccaaagggctaggattacaggtgtgagccaccacgcctggctgctgtggaatcatttttaaagtgattgtatcaatttacagtgttccgaacagtaaatggctactagtctcatcacaccctcatctttaaaaaagttttgctaatttaatagacatgattcttacatattgtcttaatttgcatttctttgcttaccagtgaggttgaacatttttttctatgttagaatctttcttgtatttcttctgttgttttcattagagtaactcagagcaggattgggaatctgaaaacatgaacatttgattttgaggaagtcattgttttcctgttgtcttccttccccctctctgctttattattttttacttcaggttcatttatagaaatatcagaaaatacaattaagcaaacagagtaaattccacttcccagagataaccactaccgtttgttgtatatccttttaagctttttctctgccaaaaatattcacaaatatatcgcttattctttctgagcctgtttcctcatctatcaaatggaatacttgttcttcaagttgataattaactggtgggagcacatgaaagtattttataaagtgcacaaatgcaagttgctgctcttatgacaaagaaaaaatgtattttattctgccaagcagaatgatgacactttgtttcctgaacacagcctgctctctccagtacaatttcttctctctagaatagcttcttgcttcaattcctcctgctgaactactatctactctttttttaaaaaaatcaatattaaaatatacaaaaattagtgtaaagagcaaccacgtacccactatacagcttaggaaaagagtctggcatttctcactcctatgcctttatatatacttgctttatttcctgtctctctatatatacatacatatatatttagtaagagcaaaaatacagtaaagatcagggaaggtgcggtggctcacgcctgtaatcccagcactttgggaggccgaggcgggcagatcacgaggtcaggagtttgagatcagcttgaccaacatggtgaaaccatgtctctactaaaaatacaaaaattagccaggcgtggtggctcatgcgtgtagtcccagctattcaggaggctgaagcagaaaaatcccctgaacctgggaggtggaggttgccgtgagccaagattgtgccactcactccagcctgggcgacagagtgagactccatctcggggaaaaaaaaaaatacagtaaaggtaaaaaacaggcaaaactaaatatattgcttaagcaataatgatactcatacaaactaatgaaaatcaaaggatttactaatacaaatttatagtagttaattggaagcatatgtattatataaatatacatgtattatacatatatgtatatatgtatatatatagaaaaaagcaaatatatgtatatatacatatatatctatatatgtaaaatttttatttataaaatgtttttgagcatgaaatgatatatcattgtggtgttaatatgcatcttagctgggcatagtaggtcacacctgtaatcccaacattttgggaggctgaggcaggaggatttcttgagctcaggagttcaagaccagcctggacagcatagtgagaccccatctctaaaaaaaaaaataaaaattatctggcgtggtggctgatgtctgtagttccagctactcaggaggctgaggtgggaggatcacctgagcactggaggtcaaggctgcagtgagctatgatcatgccactgcactccagcctggatgacagagccagatcctgtttcaaataaataaattaaattaagttaaaaagtatctccctgattagtggggaagttacccaactttttttttttttttttagacagagtctcagtctgtctcccaggctggcatgcagtggcacgatcttgtctcaccgcaacctccacctcctgggttcaagcaattctcctgcctcagtctcccgagtagctaggattacaggcatgtgccaccatacccggctaattttttgtatttagtcgagatggggtttcgccatgttgggcagactggtctcgaactcccgacctcaggtgatcctcccacctgggcctcccaaagtactgggattacaggcgtgtgccaccgtgcccagcagttacacaacttttacaagtttattgttgttcatgttgcctcttcagggaattttgtttataaagtacctattcttcaaggccccattaaaacacctccctctccataaagtatttccagatctcctctatcaagcagataggatttcctttggacttctataatcctttctttctacatcttgggtttcactcacttcttatttcatcttgcattacagtcacttgtgtacttgtctaaagggcagtgactatgtttaactcaactttatgcccttgttcatactagtacaaaagtaaacatttcataaatctttgttgaatcaaatcctactcctcccctgcttataaaatcttaaatcatttcctattgtctacagacgaaagtagaatctcgtttaatgtagaatttaagacccttccacgggctctagcatcaaccttcctttcttgctcttctcctgggaggaccttgctttccgccccagatactagattcttcatccacagtaaggtcccagtccactaatgtttggcttttctctctgtagctgggatggcaggttggtcccacccattttagttgcctataaaattcttttttttttttttttgagatggagtcttgctctgttgcccaggctggtatgcagtggcatgatcttggctcactgcaacctccgcctcctgtattcaggcaattctcctgcctcagcctcccgagtagctgggattataggcaactgccaccatgcccggctaatttttgtatttttagaagagacggggtttcaccatgttggccaggctggtctcgaactcctgacctcagatgatccgccctcctcggcctcccaaagtgctgggattacaggcgtgagccaccgcgcccggtctgagccaccgcgcccggtctgagccaccacacccggtctaatttttgtatttttagtagaggtggggtttcaccattttggccaggctggttttgaactcctgacctcgtgatctgcccgcctcggcctcccaaagtgctgggattacaggcttgagccactgcgtccagcccaaactctttaagagaaaatctcttgggatcttgaagccagaagcttgcttttattactgagtttgccctgaatctgtcacttatgtactaaaaatacataaatttccttatccaggtgacttgggctcaactgaaggaaacctgaagcatctaaatgttagcacctaagcctgagtctaggtgccagcatagcctgtcttccctctccagagtcagaggcatgttacaaacagaatatatggacacacgtcgaaccccacattgtatctctctaatttattcaatttaattcagtaaacactcattacctcttatatccaggcctagttgagggtgctggggatacaggtataaacatgacagttctcttgaggagcacagagtggttgtgggaaacagacatacagacacacagtttctttctttcttttttctttttttttttttttttgagacagagtctcactctgtccttcaggccggaatgcagtgaggtgatctcagctcaccacaacctccacctcctgggttcaagcgattctcctgcctctgactccccagtagctgggattacagtaatgcgccaccacacccacctaatttttgtatttttagtagagacaggcttttgccatgttggccaggctggtctcaaactcctgaactcaggtgatccgcctgcctcggcctcccaaagtgctgggattacaggtgtgagccaccatgcccggcccagacacatagtttcaatacaagaagtatatgtcagccagagaagggctatcttgagagtcaaggaaggctccctggaggaggtatcacttatgccagttggtacatgaatgagtaaatgcaaacaagccatgatactgaaataaagctttgtttaattaaccttcacatgtaaattcagccacagaagacattctgatacatgggggcattgccagtgattccacgaaactggataatgtcattgatgcttgtggttgagagagcttgtttctgtattgtaaggaaggtggtacaacctggcctttcttttaaaaaaaaaaaaaaattcaaactggacatgtgtcaatgaactgactggagtcttagggaggaacattgctccatagctatatgtctctcccgttttttcctgtgttagtctttttttttaatttttttaaaatttttttgagacagagtcttgctctgttgcccaggctggagtgcagtggtgtgatcttggctcgctgcaagctccgcctcccgggttcaagcaattctcctgcctcagcttcccaaatagctgggactacagatgcatgccaccatgcctggctaatttttgtatttttagtagagacagaatttcaccatgttggctacactggtttggacctcctgacctgaggggttccacctgcctcggcctctcaaagtgctgagattacaggagtgagccaccttgtctagctctttttttttttttcttttgagacaagttcttgctctgtctcccaggctggaacgcagtggtgcaatcacagctccctgcagcctcgacctccccagctcaagtgatcttcccacctcagcctccccagtagctggggccacaggcatgcaccactacgcccagctaattttttttattttttgtagagatggtgtctcaccatgttgcacaggctggtatccaactgctgggctcaagcaatcttcctgccatggcctcccaaagtgctaggattacaggcgtgagccactgtgcccacgtgttagtctttacataactgaatagtgactgaagtcttgcagtttctaccttgccctgcactggcattataagttgtagtagaaatgtcactcattgcttgtaatctcatgagaggcctagttagatttttctgtactctacttccagaggagcttataggaaggtgactttccataaaggatgtgagctttctaccacccaaatatcagtcgtaaagaaaatgaggagtgataaagaaagaaggtattgagaggtgaagccagctgggcttctaggttgggtggggacttggaaaacttttctgtctagctagaggattaaaaacgcaccaatcagcactctttgtctagctaaagtattgtaaatgcaccaatcagcacactgtaaaaacgcaccaatcagcactctgtgtctagctaaaggactgtaaacgcaccagtcagcactctgtaaaatggactaatcagcaggatgtgggtggggccaaataaggcaataaaagctggccagcgaagccagcagcaggcaacccactcgggtgcccttccatgctgtggaagctttgttctttcgctcttcacagtaaatcttgctgctgctcactctgggtccgcactaccttcatgagctgtaacactcaatgcgagggtctgcggctgcattcctgaagtcagcaagaccacaaacccaccgggaggaacaaacaactccagatgagccacctttaagagctgtaacactcactgcgaaggtgtgcggcttcactcctgaagtcagtgagaccacgaacccactggaaggaagaaactccggacacatctgaacatctgaaggaacaaactccggacacaccatctttaagagctgtaacgctcaccgtgaaggtccgtggtttcattcttgaagtcagcgagaccaagcatccaccaaaaggaataaattccagacgcagtatttacagcccagtgtccacccattccccatgtagcaacccctggtacctgaggaaaaaggtcacagcctctgccaatggtggggcatctttccgaagaggttccacttggactttttgaaacatcatgtggctgtgctgtttgagaagcctggggtgaaattaactatacaagaatcagggcatgatcacacacgcacacacctttgcaatttttctggctttgtttacactgttactgcaacttgtgccctttctcacccttttcataggtcttccctgcaaagtctttttttttttttttttttgagacggagtctcgctctgtcgttcaggctggagtgcagtggcgtgatctcggctcactgcaacctccgcctcctgggttcacgccattctcccgcctcagcctcccgagtagctgggactacaggcacctgctacctggcgcagctaatttgtgtatttttaatagagacgggtttcaccgtgttaacgaggatggtctccatctcttgacctcatgatctgcccgcctcagcctcccaaagtgttaggattacaggcctgagccaccgcacccgacccatcaactgttctcttatctgtgctcctagatctctatcttgatgtctgaaagcttcttgagagtgctttgtcaggtctatgtccatcacattctttggtggatgtggcctcacaaatctttcaactcagccctctaggtcctcatgtgcattagtggagaatagcgttcacatatgtgggctttgggtccaatgcagtttgaatcctgagtatgtcactaactagttgtgtaatttttggaacattgttaacctttctgatttcagtttccttatccttaaattgaaaattctagtagttcctacctcataggattgttgtgaaggtcaaatgagatcaaatacttacaactggacctaaggggcactcattatgagttagctgttgttactagtaacccattgtcatccctgtagatgtttcaggggtttgccgtggggaaccctgccatgcaggcttgtctcaggttctgaccctgtgatggggtctggtgttccctgcctcgtttaccactctttccccatactttggtctgactctccaatgagctcatgattcctatgagcgatttctgtctcttgatgaatctttagatttgtcctttgtcttaggccttgagactgcagtagaaccttgtggcctattctaaccccagcccggaaaccaatgccccaactccattctgggctgacttcctggcttcctcccacaacttccgggtctctgtttttatatattgttcctagactaggatatgggtgttcacaaatgtttgttgaaaggttttcagaggcaattaggcatatttaagaagtgaatgaacacctgctcattgatatgctgtccataaactaggacacggtgttgaatgatgatttgacagagattttagaatcagagagatggaagcttgatcctaactctgaatcttatggccttaagcaaaatatctaacctctttgtgcctgttttctcatttgtaaaatgaggataattatatttcctcatagggttattgtgaagattaaatgagacaatataaataaagcacctagcattttctggaacatggtaagcagttggtaaatagctgcaactaccaacaggtagttcaaaacttttcctccatctgaaaaaccaagagttgaagaaatggctgaagttggaatatctggcaggagctgtgcttaaacacaagatccggaatatctgaatatctttaggacaagatgaaataggtttctctcaaatgagttggttaaggagttaagcagtgataggtaacacttgaagtttcacaaagatgaaaactggtacttgacagacagccacttgatggtattctgaagtttactgaccctttgttctatttctagaacaaggtgttctatctctttgcccaaggtgttcaaagtatagagaaacaaagaagatcagtaattacatagaccaaatggagtatcggatttattacgaactacatctgctcaaaagactcatgaactatatggagttagtcctatcagagagaagcagggtatccagctagctcataggcctttttatacaaaagtttaccattagcatgtttggtaacattacttataagccaccccaaccccctccccacacactcaagtttccttaagtgtatgtattagttttctattgaagtacaggcaagcttgactgggttctttgctcagagtcttacaaggtcaagattaaaatatccactagattaaggacttatcttgagactgtgaggagaatctgcttccaagctcatttaggctataggtagaatcaagttccttgcagttataggtctgaggtccctgtttccttgctgactatcagtcaggggccactcttagcttctcgaggctgctctcaagtcctttccatgtggacccctccatattcaataccagcaatggcccattgaaccatcccatgctttgagtctctgacttcttttgccagctaaaggaatctctctacttataaatggctcatgtgatgaccaggataatttccccatcttaagatcaactgtttagtgccttaattgcatctgcaaaatcccttcaaaatagtgcctagattagtgtttgattgaatagccaaggattgggaatcttgggcagtcatctcagaattctgcctacacagcatggttacaatttcctgaaaagctatcctgtgaggcctgacagttatagtacaagcattggataaacattcccatttcagaatggagaaatcagccaacaagaaaggtgctacaggccccatgcaagtttgaaagctggaagggcagtcattagatcttaaagctctaacataatctttgactccatgtcccatatgctgggcataccggtgcagtgggtgggctcccaaggcatggagcagctctgtccctgtggctttgcaggattcatcacccatgactgctctcatgggctcgagttgagtgcctgtggctttgccaggcacagggtgcaagctgctgttggatctaccattcttggatctggaggatggtggccctcttctcacagctccactaggcagtgtgccccattgggaactctgtgtggggaatgtgtattaatctgttctcacactgctaataaagacatacccgagactgggtaatttataaaggaaaggggtttaattgactcacagttccaccgtggggtggggctcacaaccatggcagaaggcaaatgaggggcaaagtcaaatcttatatggcagcagacaagagagcttgtgcagtgcaactcccatttataaaaccatcagatctcagggaacttattcactaccactagaatagtatgagggaaaccactgccacgatttaattatctccacctggccccacctttgacacgtggagattgttacaaatcaaggtgagatttgtgtggggacacagccaaaccatatcagtgtgccaaccttacaattccccttggcattgacctagtagaggttctctgtgaaggctccacccctgcagcagtcttctgcctggacacccagacttgtccatacatcctctgaaatcaaggtggagggtggcaaacctcaagtcttgtgctctgtacaccgcaggcttaacactacatggaagccaccaaggcttttggcttccaccatctggaactgcagcccaagctgtacttgggcccctttgagctgtgggtagaggtggagcagcctggatgtgggaagaagtgtcccaaggctgtgcagggcagcagggccctgggcttggtccaggaaaccattcttccctcctaggccactgggcatataatgggagaggctgccatgaaggtctctaaaatgcctttgaggtctttttcccattgtctttggaattagttcttgggtcctttttagtcaagcaaatttgtctagcaaatggtggctctccacagcctgcttgaattcctctcctgaaaaagctttttctttctttgccacatagccaggctgcaaatttttcaaacttttatgctgtgcttcctgtttaaatataaattccaactttaagtcatttctttgctcccacatttaagttaggctgtcagaagcagccatgccacaacttcaatgctttgctgctgagaaatttcttctgctggccaggcgtggtggcttatgcctgtaatcccagcactttgggaggctgaggtgggcggatcacctgaggtcaggagttcgagaccagcctggtcaacatggtgaaatctcatctctattaaaaatacaaaaattagctgggcatggtggtgggtgcctgtaatccctgctactcaggaggctgaggcatgagaattgcttgaacccgggaggcagaggttgcagtgagccaagatgcaccactgcactccagcctgggtgacagagcgagactcagtctcaaaaaaaaaaaaaaaaaattcttctgtcagacacttagatcatcaccctttagttaaaagttccacagatccctagggcgtggacagaacacagccaagctctttgctaagacacaacaaatgtgacctttgttttagttctcaagaagtttctcacttccatctgagaccttgtcagcctggccttcattgtccatatcactatcagcattttggttgaaactatttaaccagtctctaagaagttccaaactttccctcaccttcctatcttcttctgagccctccaaactcttccaacctatacttgttacccagttg

SEQ ID NO: 1599 - DNA, 7573 bp, Homo sapiens
ggtattaaaactgatcttttgacatttttgacaatgttcttataaattactttcttttttatcatatatggatgggatgaagcacagagtaagatagagtgcacagcaaaggggatctgcccctcctatctgtccaataccccacaggttttggtgataatcttgggcaatgttccagtcaaacctgcctcccacttctcactaaagttagtgaacatgtgacccacattccccaaataagagcctcttataaactccattcttggctttttcattcatagagatagctattttatgagacatagataaagcattttttagtgatgtgcacgatgccttttttcttaattattaacttctcaaaacataaacacattggaggcacttaataaagggagctgtacgtaccgccgtccgcgcctccaaggtttcacggcttcctcagcagagactcgggctcgtccgccatgtccgccgcagacgaggttgacgggctgggcgtggcccggccgcactatggctctgtcctggataatgaaagacttactgcagaggagatggatgaaaggagacgtcagaacgtggcttatgagtacctttgtcatttggaagaagcgaagaggtggatggaagcatgcctaggggaagatctgcctcccaccacagaactggaggaggggcttaggaatggggtctaccttgccaaactggggaacttcttctctcccaaagtagtgtccctgaaaaaaatctatgatcgagaacagaccagatacaaggcgactggcctccactttagacacactgataatgtgattcagtggttgaatgccatggatgagattggattgcctaagattttttacccagaaactacagatatctatgatcgaaagaacatgccaagatgtatctactgtatccatgcactcagtttgtacctgttcaagctaggcctggcccctcagattcaagacctatatggaaaggttgacttcacagaagaagaaatcaacaacatgaagactgagttggagaagtatggcatccagatgcctgcctttagcaagattgggggcatcttggctaatgaactgtcagtggatgaagccgcattacatgctgctgttattgctattaatgaagctattgaccgtagaattccagccgacacatttgcagctttgaaaaatccgaatgccatgcttgtaaatcttgaagagcccttggcatccacttaccaggatatactttaccaggctaagcaggacaaaatgacaaatgctaaaaacaggacagaaaactcagagagagaaagagatgtttatgaggagctgctcacgcaagctgaaattcaaggcaatataaacaaagtcaatacattttctgcattagcaaatatcgacctggctttagaacaaggagatgcactggccttgttcagggctctgcagtcaccagccctggggcttcgaggactgcagcaacagaatagcgactggtacttgaagcagctcctgagtgataaacagcagaagagacagagtggtcagactgaccccctgcagaaggaggagctgcagtctggagtggatgctgcaaacagtgctgcccagcaatatcagagaagattggcagcagtagcactgattaatgctgcaatccagaagggtgttgctgagaagactgttttggaactgatgaatcccgaagcccagctgccccaggtgtatccatttgccgccgatctctatcagaaggagctggctaccctgcagcgacaaagtcctgaacataatctcacccacccagagctctctgtcgcagtggagatgttgtcatcggtggccctgatcaacagggcattggaatcaggagatgtgaatacagtgtggaagcaattgagcagttcagttactggtcttaccaatattgaggaagaaaactgtcagaggtatctcgatgagttgatgaaactgaaggctcaggcacatgcagagaataatgaattcattacatggaatgatatccaagcttgcgtggaccatgtgaacctggtggtgcaagaggaacatgagaggattttagccattggtttaattaatgaagccctggatgaaggtgatgcccaaaagactctgcaggccctacagattcctgcagctaaacttgagggagtccttgcagaagtggcccagcattaccaagacacgctgattagagcgaagagagagaaagcccaggaaatccaggatgagtcagctgtgttatggttggatgaaattcaaggtggaatctggcagtccaacaaagacacccaagaagcacagaagtttgccttaggaatctttgccattaatgaggcagtagaaagtggtgatgttggcaaaacactgagtgcccttcgctcccctgatgttggcttgtatggagtcatccctgagtgtggtgaaacttaccacagtgatcttgctgaagccaagaagaaaaaactggcagtaggagataataacagcaagtgggtgaagcactgggtaaaaggtggatattattattaccacaatctggagacccaggaaggaggatgggatgaacctccaaattttgtgcaaaattctatgcagctttctcgggaggagatccagagttctatctctggggtgactgccgcatataaccgagaacagctgtggctggccaatgaaggcctgatcaccaggctgcaggctcgctgccgtggatacttagttcgacaggaattccgatccaggatgaatttcctgaagaaacaaatccctgccatcacctgcattcagtcacagtggagaggatacaagcagaagaaggcatatcaagatcggttagcttacctgcgctcccacaaagatgaagttgtaaagattcagtccctggcaaggatgcaccaagctcgaaagcgctatcgagatcgcctgcagtacttccgggaccatataaatgacattatcaaaatccaggcttttattcgggcaaacaaagctcgggatgactacaagactctcatcaatgctgaggatcctcctatggttgtggtccgaaaatttgtccacctgctggaccaaagtgaccaggattttcaggaggagcttgaccttatgaagatgcgggaagaggttatcaccctcattcgttctaaccagcagctggagaatgacctcaatctcatggatatcaaaattggactgctagtgaaaaataagattacgttgcaggatgtggtttcccacagtaaaaaacttaccaaaaaaaataaggaacagttgtctgatatgatgatgataaataaacagaagggaggtctcaaggctttgagcaaggagaagagagagaagttggaagcttaccagcacctgttttatttattgcaaaccaatcccacctatctggccaagctcatttttcagatgccccagaacaagtccaccaagttcatggactctgtaatcttcacactctacaactacgcgtccaaccagcgagaggagtacctgctcctgcggctctttaagacagcactccaagaggaaatcaagtcgaaggtagatcagattcaagagattgtgacaggaaatcctacggttattaaaatggttgtaagtttcaaccgtggtgcccgtggccagaatgccctgagacagatcttggccccagtcgtgaaggaaattatggatgacaaatctctcaacatcaaaactgaccctgtggatatttacaaatcttgggttaatcagatggagtctcagacaggagaggcaagcaaactgccctatgatgtgacccctgagcaggcgctagctcatgaagaagtgaagacacggctagacagctccatcaggaacatgcgggctgtgacagacaagtttctctcagccattgtcagctctgtggacaaaatcccttatgggatgcgcttcattgccaaagtgctgaaggactcgttgcatgagaagttccctgatgctggtgaggatgagctgctgaagattattggtaacttgctttattatcgatacatgaatccagccattgttgctcctgatgcctttgacatcattgacctgtcagcaggaggccagcttaccacagaccaacgccgaaatctgggctccattgcaaaaatgcttcagcatgctgcttccaataagatgtttctgggagataatgcccacttaagcatcattaatgaatatctttcccagtcctaccagaaattcagacggtttttccaaactgcttgtgatgtcccagagcttcaggataaatttaatgtggatgagtactctgatttagtaaccctcaccaaaccagtaatctacatttccattggtgaaatcatcaacacccacactctcctgttggatcaccaggatgccattgctccggagcacaatgatccaatccacgaactgctggacgacctcggcgaggtgcccaccatcgagtccctgataggggaaagctctggcaatttaaatgacccaaataaggaggcactggctaagacggaagtgtctctcaccctgaccaacaagttcgacgtgcctggagatgagaatgcagaaatggatgctcgaaccatcttactgaatacaaaacgtttaattgtggatgtcatccggttccagccaggagagaccttgactgaaatcctagaaacaccagccaccagtgaacaggaagcagaacatcagagagccatgcagagacgtgctatccgtgatgccaaaacacctgacaagatgaaaaagtcaaaatctgtaaaggaagacagcaacctcactcttcaagagaagaaagagaagatccagacaggtttaaagaagctaacagagcttggaaccgtggacccaaagaacaaataccaggaactgatcaacgacattgccagggatattcggaatcagcggaggtaccgacagaggagaaaggccgaactagtgaaactgcaacagacatacgctgctctgaactctaaggccaccttttatggggagcaggtggattactataaaagctatatcaaaacctgcttggataacttagccagcaagggcaaagtctccaaaaagcctagggaaatgaaaggaaagaaaagcaaaaagatttctctgaaatatacagcagcaagactacatgaaaaaggagttcttctggaaattgaggacctgcaagtgaatcagtttaaaaatgttatatttgaaatcagtccaacagaagaagttggagacttcgaagtgaaagccaaattcatgggagttcaaatggagacttttatgttacattatcaggacctgctgcagctacagtatgaaggagttgcagtcatgaaattatttgatagagctaaagtaaatgtcaacctcctgatcttccttctcaacaaaaagttctacgggaagtaattgatcgtttgctgccagcccagaaggatgaaggaaagaagcacctcacagctcctttctaggtccttctttcctcattggaagcaaagacctagccaacaacagcacctcaatctgatacactcccgatgccacatttttaactcctctcgctctgatgggacatttgttacccttttttcatagtgaaattgtgtttcaggcttagtctgacctttctggtttcttcattttcttccattacttaggaaagagtggaaactccactaaaatttctctgtgttgttacagtcttagaggttgcagtactatattgtaagctttggtgtttgtttaattagcaatagggatggtaggattcaaatgtgtgtcatttagaagtggaagctattagcaccaatgacataaatacatacaagacacagaactaaaatgtcatgttattaacagttattaggttgtcatttaaaaataaagttcctttatatttctgtcccatcaggaaaactgaaggatatggggaatcattggttatcttccattgtgtttttctttatggacaggagctaatggaagtgacagtcatgttcaaaggaagcatttctagaaaaaaggagataatgtttttaaatttcattatcaaacttgggcaattctgtttgtgtaactccccgactagtggatgggagagtcccattgctaaaattcagctactcagataaattcagaatgggtcaaggcacctgcctgtttttgttggtgcacagagattgacttgattcagagagacaattcactccatccctatggcagaggaatgggttagccctaatgtagaatgtcattgtttttaaaactgttttatatcttaagagtgccttattaaagtatagatgtatgtcttaaaatgtgggtgataggaattttaaagatttatataatgcatcaaaagccttagaataagaaaagctttttttaaattgctttatctgtatatctgaactcttgaaacttatagctaaaacactaggatttatctgcagtgttgcagggagataattctgccttaaattgtctaaaacaaaaacaaaaccagccaacctatgttacacgtgagattaaaaccaattttttccccattttttctccttttttctcttgctgcccacattgtgcctttattttatgagccccagttttctgggcttagtttaaaaaaaaaatcaagtctaaacattgcatttagaaagcttttgttcttggataaaaagtcatacactttaaaaaaaaaaaaaaaactttttccaggaaaatatattgaaatcatgctgctgagcctctattttctttctttgatgttttgattcagtattcttttatcataaatttttagcatttaaaaattcactgatgtacattaagccaataaactgctttaatgaataacaaactatgtagtgtgtccctattataaatgcattggagaagtatttttatgagactctttactcaggtgcatggttacagccacagggaggcatggagtgccatggaaggattcgccactacccagaccttgttttttgttgtattttggaagacaggttttttaaagaaacattttcctcagattaaaagatgatgctattacaactagcattgcctcaaaaactgggaccaaccaaagtgtgtcaaccctgtttccttaaaagaggctatgaatcccaaaggccacatccaagacaggcaataatgagcagagtttacagctcctttaataaaatgtgtcagtaattttaaggtttatagttccctcaacacaattgctaatgcagaatagtgtaaaatgcgcttcaagaatgttgatgatgatgatatagaattgtggctttagtagcacagaggatgccccaacaaactcatggcgttgaaaccacacagttctcattactgttatttattagctgtagcattctctgtctcctctctctcctcctttgaccttctcctcgaccagccatcatgacatttaccatgaatttacttcctcccaagagtttggactgcccgtcagattgtttctgcacatagttgcctttgtatctctgtatgaaataaaaggtcatttgttc

SEQ ID NO: 1600 - DNA, 4974 bp, Homo sapiens
atgtccgccgcagacgaggttgacgggctgggcgtggcccggccgcactatggctctgtcctggataatgaaagacttactgcagaggagatggatgaaaggagacgtcagaacgtggcttatgagtacctttgtcatttggaagaagcgaagaggtggatggaagcatgcctaggggaagatctgcctcccaccacagaactggaggaggggcttaggaatggggtctaccttgccaaactggggaacttcttctctcccaaagtagtgtccctgaaaaaaatctatgatcgagaacagaccagatacaaggcgactggcctccactttagacacactgataatgtgattcagtggttgaatgccatggatgagattggattgcctaagattttttacccagaaactacagatatctatgatcgaaagaacatgccaagatgtatctactgtatccatgcactcagtttgtacctgttcaagctaggcctggcccctcagattcaagacctatatggaaaggttgacttcacagaagaagaaatcaacaacatgaagactgagttggagaagtatggcatccagatgcctgcctttagcaagattgggggcatcttggctaatgaactgtcagtggatgaagccgcattacatgctgctgttattgctattaatgaagctattgaccgtagaattccagccgacacatttgcagctttgaaaaatccgaatgccatgcttgtaaatcttgaagagcccttggcatccacttaccaggatatactttaccaggctaagcaggacaaaatgacaaatgctaaaaacaggacagaaaactcagagagagaaagagatgtttatgaggagctgctcacgcaagctgaaattcaaggcaatataaacaaagtcaatacattttctgcattagcaaatatcgacctggctttagaacaaggagatgcactggccttgttcagggctctgcagtcaccagccctggggcttcgaggactgcagcaacagaatagcgactggtacttgaagcagctcctgagtgataaacagcagaagagacagagtggtcagactgaccccctgcagaaggaggagctgcagtctggagtggatgctgcaaacagtgctgcccagcaatatcagagaagattggcagcagtagcactgattaatgctgcaatccagaagggtgttgctgagaagactgttttggaactgatgaatcccgaagcccagctgccccaggtgtatccatttgccgccgatctctatcagaaggagctggctaccctgcagcgacaaagtcctgaacataatctcacccacccagagctctctgtcgcagtggagatgttgtcatcggtggccctgatcaacagggcattggaatcaggagatgtgaatacagtgtggaagcaattgagcagttcagttactggtcttaccaatattgaggaagaaaactgtcagaggtatctcgatgagttgatgaaactgaaggctcaggcacatgcagagaataatgaattcattacatggaatgatatccaagcttgcgtggaccatgtgaacctggtggtgcaagaggaacatgagaggattttagccattggtttaattaatgaagccctggatgaaggtgatgcccaaaagactctgcaggccctacagattcctgcagctaaacttgagggagtccttgcagaagtggcccagcattaccaagacacgctgattagagcgaagagagagaaagcccaggaaatccaggatgagtcagctgtgttatggttggatgaaattcaaggtggaatctggcagtccaacaaagacacccaagaagcacagaagtttgccttaggaatctttgccattaatgaggcagtagaaagtggtgatgttggcaaaacactgagtgcccttcgctcccctgatgttggcttgtatggagtcatccctgagtgtggtgaaacttaccacagtgatcttgctgaagccaagaagaaaaaactggcagtaggagataataacagcaagtgggtgaagcactgggtaaaaggtggatattattattaccacaatctggagacccaggaaggaggatgggatgaacctccaaattttgtgcaaaattctatgcagctttctcgggaggagatccagagttctatctctggggtgactgccgcatataaccgagaacagctgtggctggccaatgaaggcctgatcaccaggctgcaggctcgctgccgtggatacttagttcgacaggaattccgatccaggatgaatttcctgaagaaacaaatccctgccatcacctgcattcagtcacagtggagaggatacaagcagaagaaggcatatcaagatcggttagcttacctgcgctcccacaaagatgaagttgtaaagattcagtccctggcaaggatgcaccaagctcgaaagcgctatcgagatcgcctgcagtacttccgggaccatataaatgacattatcaaaatccaggcttttattcgggcaaacaaagctcgggatgactacaagactctcatcaatgctgaggatcctcctatggttgtggtccgaaaatttgtccacctgctggaccaaagtgaccaggattttcaggaggagcttgaccttatgaagatgcgggaagaggttatcaccctcattcgttctaaccagcagctggagaatgacctcaatctcatggatatcaaaattggactgctagtgaaaaataagattacgttgcaggatgtggtttcccacagtaaaaaacttaccaaaaaaaataaggaacagttgtctgatatgatgatgataaataaacagaagggaggtctcaaggctttgagcaaggagaagagagagaagttggaagcttaccagcacctgttttatttattgcaaaccaatcccacctatctggccaagctcatttttcagatgccccagaacaagtccaccaagttcatggactctgtaatcttcacactctacaactacgcgtccaaccagcgagaggagtacctgctcctgcggctctttaagacagcactccaagaggaaatcaagtcgaaggtagatcagattcaagagattgtgacaggaaatcctacggttattaaaatggttgtaagtttcaaccgtggtgcccgtggccagaatgccctgagacagatcttggccccagtcgtgaaggaaattatggatgacaaatctctcaacatcaaaactgaccctgtggatatttacaaatcttgggttaatcagatggagtctcagacaggagaggcaagcaaactgccctatgatgtgacccctgagcaggcgctagctcatgaagaagtgaagacacggctagacagctccatcaggaacatgcgggctgtgacagacaagtttctctcagccattgtcagctctgtggacaaaatcccttatgggatgcgcttcattgccaaagtgctgaaggactcgttgcatgagaagttccctgatgctggtgaggatgagctgctgaagattattggtaacttgctttattatcgatacatgaatccagccattgttgctcctgatgcctttgacatcattgacctgtcagcaggaggccagcttaccacagaccaacgccgaaatctgggctccattgcaaaaatgcttcagcatgctgcttccaataagatgtttctgggagataatgcccacttaagcatcattaatgaatatctttcccagtcctaccagaaattcagacggtttttccaaactgcttgtgatgtcccagagcttcaggataaatttaatgtggatgagtactctgatttagtaaccctcaccaaaccagtaatctacatttccattggtgaaatcatcaacacccacactctcctgttggatcaccaggatgccattgctccggagcacaatgatccaatccacgaactgctggacgacctcggcgaggtgcccaccatcgagtccctgataggggaaagctctggcaatttaaatgacccaaataaggaggcactggctaagacggaagtgtctctcaccctgaccaacaagttcgacgtgcctggagatgagaatgcagaaatggatgctcgaaccatcttactgaatacaaaacgtttaattgtggatgtcatccggttccagccaggagagaccttgactgaaatcctagaaacaccagccaccagtgaacaggaagcagaacatcagagagccatgcagagacgtgctatccgtgatgccaaaacacctgacaagatgaaaaagtcaaaatctgtaaaggaagacagcaacctcactcttcaagagaagaaagagaagatccagacaggtttaaagaagctaacagagcttggaaccgtggacccaaagaacaaataccaggaactgatcaacgacattgccagggatattcggaatcagcggaggtaccgacagaggagaaaggccgaactagtgaaactgcaacagacatacgctgctctgaactctaaggccaccttttatggggagcaggtggattactataaaagctatatcaaaacctgcttggataacttagccagcaagggcaaagtctccaaaaagcctagggaaatgaaaggaaagaaaagcaaaaagatttctctgaaatatacagcagcaagactacatgaaaaaggagttcttctggaaattgaggacctgcaagtgaatcagtttaaaaatgttatatttgaaatcagtccaacagaagaagttggagacttcgaagtgaaagccaaattcatgggagttcaaatggagacttttatgttacattatcaggacctgctgcagctacagtatgaaggagttgcagtcatgaaattatttgatagagctaaagtaaatgtcaacctcctgatcttccttctcaacaaaaagttctacgggaagtaa

SEQ ID NO: 1601 - DNA, 25424 bp, Mus musculus
gatccttcaatcgccacctgcctccctcccctgtagtgtgggagttacaggcaagcatggccatgccccactttttacgaatgctggggatttgaacccaggtcctcatgcttgcacagaaaatgctcttacctactgagccatctccataatcacctcaattttcttttcttttaaaaatatttttattttatttttgttgggtgttttgtctaagtatatgcctgtgttcccacagaggccagcagagggcatcatagcctctggaactgacattatggacaattatgagctaccaagtgggcactaggaatcaaacctaggtccttaggaagaggaccttggaagagctcttaactcccgagccatctctggagtcccccacttaactgtgaacagcagttctgcaaatcaaaccaagacctcacccatactaggcgagcactccagtccttagctgtatctctcacccacttatgacctttcatgctacacaagtattttcattttatatatttttatttttcttatttgtttggcttagtagacgtgttatcacacctggtcatgatctgtttctaccccactcccgtttttcatgcatgtgctgtggtatgcatgtgtgtatacatgtatatatgcatgtgtatatacatgtatgtatgcatgttcatatacatgtgtgtatgcatgtgtgcatacatgtgtatgcatgtgtgtatgatgtgtgtatacatgtgtgtatgcatgtgcgtatacatgtgcgcatacatgtgtgcatgcatgtgtgtatacatgtgtgtatgcatatgtgcatacatgtttgtatacatgtgtgtatgcatgtgtgtatacatgtgtgtatacacgtgtgtatgcatgtgtgtatgcatgtgtgtatgcatgtgtgtatgcatgtgtgtatgcatgtgtgtatgcatgtgtgtatacatgtgtgtatgcatgtgtgtatgcatgtgtgtatacatgacttttcctgtgtgagagtgcacttgtgtgtggatatacatgcatgtgtggaccagagcacgtggagggccgaggctgatgttgagaattaccttccattgctttcccactttatccagggtctctcaatcaaacccagagctcactgatatgactaatcttactaaggagcttcctctggagagtgagctcccatctccactttccaaggctgacataggaggcaggccatcatgcatacctggcatttactcgtttctgggcatccaaactctagcgctcacgcttgtaaagcaagtgcttaacctgagccatcatgcgatctgctctaattttttaagacaggtcttgctttgtattccttgctagcctggaactctgtgtagcccacactggccttgaacacttgcccttttttaaaatttatttttattattttatgtgtatgattattttgcttgcctgcatgtgagagcactgtgtgtgtgcctggtacccgctgagttcaaaatgtccttgtatgccctgagactggagttacagacaagtactcttaactttggagtcacctctccagcccttcttttgtgttttgataaatgaggttaattagtgaagaaatggtgcattcaaactgttacagtttcttctaggctccacaccatggttacctggcaacagctaggtatgcctgactcactatagaagggactgcttgcctgtcttctcttactctttttttttttttttttttttttttttgagacagggtttctctgtatagctctggctgtcctggaactcactttgtagaccaggttcgcctcgaactcaaaaatccgtttgcctctgccttctgagtgctgggaataaaggtgtgcgccaccacgcgcccggcttctctcttactcttttactctctaactctcctccctttctgccccttctctccccattcccctccccacatctctccacgggttaatggtcagcctctctctctctctctctctctctctctctctctctctctctctctctctctgcctttctctgcctctattaccccctaactcccctccccatgccctaaatgaactctagtttatactatacctcgtcctgtgcctgagcatgggcccacagaggcaccccctcacctcatcataccacaccacctccaaacatatccttggcctttctttcttttttataaaacagaaaacaaacgtttttgggggtgatgtggaaatccaattcagaatctataaaaagacaggatgaacgaaattgactggataaaaattcagatttggggctggagaggtggctcggtgattaagagcacacacttactcttgcagaggagcaaagtttgactcttagcactcacgttgggcagttaataaccttctctaattccagttccagaggatccaatacctctggcctctgtgggcatccaaattcaaatgcaaatacccacacagaaacacataattaaaaataaaataaaccgtgatggagagagagctcagcagttaagagcactgactgctcttccagaggtcctgagttcaagtcccagcaaccacatggtggcttacaaccatctttaatgggatctgatgccctcttctggtgtgtctgaagacagctataatgtacttataaataaaatatataagtcttttcttaaaaaattaaaaaataaaatgaaccttaaaaaaaaaaccaaaacccagatgtggggctgaagagatggcttggtggttaagagcattggctgctctttcagaggaccctggtacaacctcccgcacccacatggtagttcacaacttttataactccagtcaggagatcctacaccctcaaaccagtgcacataaaataaaataaaataaaataaaataaaataaaaaatttaaagccaaatatcattttaagtcagaagaaatgaatttattttgctgtgtgtatgtttgtgtgtgtgtgtgtgtgcgcgcgtgcgcgcgcgtgcgagccagagttacagggaagttgtaaggcacccatacgggtgctgggatctgaaactcggaatcctttgaatgagcaggaagtgctatttaccagtaaactatctctccaacattcaaattctttcatttgatagactacgagaaagcaaacgacaaaatgagaaaacaacagttcctgggtcagcgagatggctcagtgggtaaaggtgcattttatcgtagaccacggaggatattgtttatcacttctcccttagatttcctacctgagtgtccaggtagttactctcttgtttttatttagtatggatcccatggaaccaggcccacaaactgttgtgagctgtaatgtaggtgttggggtcttctgcaagagcagcaagtgctcttaactcttacgcgcgctcaactggccaggaagaacgacgctgcaacaggatccttctgcacacgtttattgggagagcttgattgtagaggcgaaaagaccctgagcccagaactggtgctgcttacataggcctaggagaggtgtgtctcacatctgattggttaacttgtcttggcaaaagaaccttcactgcctatgtatgtgtagtggccagcagtagccaactgccactctgcaactgccactctgcaactgccactctgcaacggcttcccacacttaaccactgaaccatctctccagcccccaagtcaagggttttaactagagcgagtaagggagtaaaagtttgtatgctctttgggaagagagcaatccgtacagagtaggaatggctgtgtcggggacagaagtgggtttagatttatcctttatctgttatcctctccctgtccctccattaaggcgggcactaaaacaaagtggcacacttttcttggaagctcatttcacccagtcttggggcttaagtgccctcaaagctgaaaagttcacttggtgaaggggtagcaggcactccatgcatactcttatctagagataccctgaagccagttgaagctgagccaactagtagaccactaccatctattgctgttctttacatcctgttttggggaccttgagatgacccatctggaaggaccactattgtcctttgtgtcctgttttagggtgcctgggtggtcattccctcccagagctaacctcttgcctaactgtagggcaggttccaaggagccgactatagactaggacttacaaagcagaaagagcggggcggggctttcgtgaagacgcaagaataccacgtgtgaaaacaaaggggagtgcaaccccggagtgcaaatgcctgtgcgtagctgcaaatttccaggagaggtgcgaacttgggccaagaggaactttgattgcgcagatttcttctctgcttagagtcagcttttggctctcgagggctcatttgccactcaattctcagctgaaaaagactgataaattcacccagctttcattttttatagataaatacacgcgagctttagagaattggcactatctgtctcaggtgaaagctttgggcagtactagaagacagacagctagtcctgggtcgtcctctgcctctgatccggaggcattacttacggctatcaaaccctctgttcgctcaggtacaaaccacccccccccccgtctctgggtaaactacatttcccgcaatgcatcgggtggaacttccctcccaacgcccatctggacgcagttttcaccaatagtggagcagaatttcaggaactgttgtggacagccaatgagagtggccatgggcgggcctctcccgtccattgttctctgtgccccttgggcttgagctgaggtgaatccagaggggccgggccgggccgggccagaccgtggggtgcttttgcgctcagagagatagcgggaacaggacctggtccctggagaggcgagcgggagaggcaggtcaggagccgcgcgccccgcggggaacagccagagagacagcgagtaacgggcctggagccagctcagggcagtttgggggaggggcgttcggtgtccgcgcccgacgggctggacgcgcagctctgcgtcctggttcttcggagccctcgaggctccgctcacaccagagcgctgggtacgcgcagcctaggaacgcaggctttacactgggaagggatgctcgacgacatcccaccgagccgcctccttgaccaggtggggaaactgaggttctgagggggcgtgtcggagccaggcttagctaataagctgtctaggttcagtgttcccgggatgtccaggaagaattacgatgtatttgtgtttcacgtagtcattttggacaaattgacattgggagcttcagttttctttctgttgttgctgttctgttttaacttttgctattttcatgggggagggcatgttatctgattctatggtgtaatgattttttaaaaataaatattcattgctttcataatacttatatagtttttaattccactgctttgaatattttgtagagctactactcagatctaggtgtgtgtcccccacacccccaccccccgcaatgatccccatgtgtgttcatttaaaaaggaattgggcaggcagtaatctcagcactcaggaagcaggacaggcaggtcaggagttcgaggccagcgtgggctacataatgagatcttgcttcagaagcaaaaaaataaacagaaatgtctgtactgaacatgtaggagcgttctcgttattattcccaaacagtacagcataccaactgtttacatattatttacacttaagtatatgttgtctagagatgattgaaggtatttggtacaccattttatataggggccttgaggagtcctggattctgggatctgggagattatctgagggcaacctcctttgaaatatagcactaatgacttgtagtgaagctgggggcaccttgacatgcgatccattagtaatcactatgatgttccatatgataaggatgagtgttatctattcattaagtggtcactgaggttgaatgactaacctctttgttaggtcacagtctctgaagggagtctgaactgacttagggtaggatatgtcagttctgtttctctcagcccagatcactgcatcccactactcttcctttggtcttctgaaaagagcaatgctgtgtatgtgtgtggtagttgttattattattattattattattattattattattattattattattattgggttgctatatccccttgttgtctttaaatatctactaggtgtttctaccccacttcagaccatattgttcccagataaaagacacagaaacctgtagattcataataagcttaaaagcattaaagttgggctattttgtctacctcccaaggtatcacttgccatgctctgcctgggccgcttctactccatcaggccagcccctatagccatgggctcatgaactacctcccccatggccacttccttctttctttttctctcttcatggtctctacctcagatcccaagcctgggaacctttgctccaccccctgccttctgcccagtcatctctattggctgggataagttggggggtggggcaaggtttacagagcatcatttggtgtatatgagaccttctagttgcgtgcaaccagatcttgggggccagtatttagcatttgaatagtgatatcagaccaatgttgtgtgtgtgtgatatttcttcttttttgggggggggggggtgggtgtttcaagacagggtttctctgtatagccctggctgtcctggaactcactttgtagaccaggctggccttgaactcagaaatccgcctgcctctgcctcccgagtgctgggattaaaggtgtgcgccaccacgatgggctgtcatattccttttgccatagagagtcactgcttttagaagtaaggcaacaagcctctgttggttttaaatatgcggaggctgctatgagatggctgtagcagtttccttagtgattctggttctctgccttgtttctcagcagtgtttcttgttgagattggaggaaagacggccttctcagagagcctgactggagacaggtgttaggcttgaagccttcgtgaccatccaggaagttggacaatggcagccgaagtgccagcagtgagcactcccctcagccctttggttcaggtacctcaagaagaagatgaacaggcagaggtcaccactatgatcctggaggatgacgcgtgggtgcaggaagcagtgctgcaggaggatggccctgagtctgagccctttccccagagtgctggaaaaggcagcccccaggaggaggacgcagccgagggaccccagggtgctcttgtccgatttcgggagctctgtcggcgctggctgaggccagaggtgcacactaaggagcagatgctaactgtgctgccaagagaaattcaggcctggctgcaagaacatcggcctgagagcagtgaggaggcagtggccctggtggaagacctgacccagacttttcggcacagtggtaagacagaaccacagagggagagggtgggagccttcggaggttggagtagtgtcagggttttgttgctgttggtggtgttggtggttgtggtgtgtgtgtgtgtgtgtgtgtgtgtgtgtgtgtgtacagagaatggtctttgaacagactaggagatggcgcttgtctcttatgctccctgcagcactcagcaagatcctagctcttttagatccctcaccaatgtgcagtggtagctccagaatttcagtctgaggactcggagggctattcttggagctccgtttgcatacgaaacacagctttcacttgtttattccagggattggaaagtttcctgagatgagagataaaggtcaatggtaaataaaatgcctgcctagcacgcacaggaggttatcggaagctatttttgtgtttgtgatttttaattttccttgctatagagaaaaagtgtttcttcctcctccccctcctcttcttcctcctcttcctccttctcttcttcctccccctcctcttctccttcttcttcttcttctcttctgtcttctgtcttctgtcttcttgatcatgtctcattatgtagctctggctggcctaaactcactgtgtagaccaggctgacgtcaaacccacagagatctgcctgcctgcctctgcctcaagaataagacattcttcccttaagggaaacagaaaatttctgttgttttgcaggtatgagaacaaaaaagacctccataacccaccctttggttccttcagttggttgtaatcattcaaatagttccagcaattggaataaaagcatgccacttttttcaaagtggtcattgtatgaaaccatgataaacaataagtaaattgtctgggctttctgtgatatgatgtcatcttatatcctttaaagagtaattggccaggctaggaagggcacacctattatcctagcacttagaacccaggctagtatctacttcagttcttcctttccctaggataacttcaggaccctaagatgtggctgctttgtgttgatgaagtacttcaggaatacagaagggcatgtagagaggacaggccagaccagagaaggcttcgtagaagacatggaccatgagtaggagcttgcagactgaagtagaaattggaaagtcacagggcgaggagacagctgtgactgctgagaggagctgtaggtagccaaggctctgaagtgggggagcagcagaggaaggaggtttcttcagattcagagccggtgaggcaggcttgtgttttcaggaagtggtgggagtttggggggagggaggatggaggtttgaatgaaacgccattggcctcagcaggctcttgatctagggcctgtggggcaggagaggaagctgagcttggcaacaggatgtaggtttgattaggggagagaggctagaggttggggagcagtcaggaagcagcctggccatggtgtgtgcagggacaagagtctggccgtgggacgatgggacgtgagagaaagaacagcgtcgtgggagtgctttcaccaagccctcagtctgccggaagatgagtggactattgtccttagaggaagagtgacccactctaagatcacgcagccagtatgaggcaaagccaagactcttgtccttaagcatgccattgcaggaggggtcctaatgatttctagcaaggtgctggaaggaggagatcccagcagggattggggcagagcctctgtactgtccactctggaggacttagtcgattagagagggagatcatgaggagggggtagttcagggcagaaggtgtgactgcagccaaggactgagagatatggagaagtctgtcctcagaagaaaggtctgggcttaggggactgactgaaactagcccctcgctgggcaccttatatggcacccacaccaagaatcttgtgagatgagtgggaccgtcactgggcagaggaagcgcaacagcttcacacagctgtcattcggtagagccaggattcaaactcgggtctgtttgcttcagcctgagtttataggcaggacgttttatttgaagtgaagtattttactttctttgactttgacagataacttccttaggggtgtgcttgagatcaagcctaggaagtgggtcatgtgaggaagggctgtgtcactgagcctcacctacagcccaggaacttaattaacctacctttgaattgggagcgtgtctcttcccagctggcctaaagctggtatagtcaaggataaacttgaacttaaaaatatttcttttacttagttttatgtgtgtgggtattttgcctgcatgcatgtatgtgcactgtgcatgtgcctggtgccctcagaaggaggcatcagatctcccagaactgtatttatggaccacactctgagctgacaaggaggtgctgggaatcgaaccttggtcctctgggagagcagccagtgtgccgagctgctaagccatttacagccccaccttgaacttttgatgggcccacttcaccggataggattgtagatgtgtgctggcgttcctagttcttgtggtgcagaggcaccaaacccagggctgcttgcctctttgacaagcagggtaccaacctaactacatctttagtcagtttgttttgagacacattgtatcctaaattggcctgggtcttctggtaatcctcctgtttcagccccctgaagtctgggactatgtgatatgctaccatatttgacttgattttatactttgtacaaagaagaagaggggaaagaaactctgtcatcccgtttcagatctcccttgcctgctgatggctgaggcgagtttatgatgaccttcagggtttccaagtcaccccagaggcttgggctgaggtgtgtttggtgattgttaccttagggcagtgccaggtcagtgctgtggctcagcaggggtctgaggtgaccacagccctcaccacagccttgcagtgccttcctttctcattggtcatctgagttggtggtgggttctccctagaggaatcaggaggctaccctgtgacttctgcctctaagattatctctgctggcctctgtttgataacacgttgtgcccttcttcctcatagctgctcacaggaatctatattttccttcattccttcttaaacatcgattacctgagagcagccggcctctattctgattgttaagataaaggccttagggtttgtttacacaggaaagggcatttcaaggcctggtgagtcattgggtaatatttgactgagaggcacctctgggtgtatgcacttagtgttctgtgactccaagtaaaaccatccctcccgtatagttacgtgtaaagttgagctctatttgtccatgagtcccgcagttgttttagctccatttcaagccctgaatcaggctttgggatttcctgactgaatttttgcagtagtctctgaactaatcttgtagtctctttgccagtcatcagactccttcacatcgcccagagcagtccacctgcagcctccacaggcttctccctccttctcccacaggacacttgctcgctctctctctctccctcgctctctctctctctctctctgtttttgttattttctggctttttgttttgagatgaggcctcattgttgtgtctagacgaggctggtctttttgttttgttttgggtttttgtttgtttggttggttggtttggggttgttttttttttgtttttgtttttgttttccctaaacagggttactttgtatagccctggctgtcctggaactcactctgtagatcaggctggcctcgaactcatcatcttcctgccttagtcttttgactcaatcttgtttttctatttatatactcttatatcttttaggaacttaacaaaagtcccaaaggccagggacctaatccactcctcctaatcctttctcagttcctgctaacagtgagcactcagtgagtattgttgggataaatgaaggacacttttgcatctacaggtcgagagacctctacttgggatttcctgactgaattgttgcagtggtctctgaagacaaggttggagttgaaaatctgggttacagagaattccctttggtgcagaggacagggaaaccgctcaagctgatgatgagctgggtctgagcgatggagaatgagactgggagactgaatagtcaaagctcagaataaaagatggaggagttggctcagcagctaagaatacgtactgcccatgcagagggcccaggtatggtttctagcacccagacaacaacttaaaaccatctgtggctccagttccagggggtctgatgccctcttttaaccttctgggaaacaggcatgcatgtggtgcacgtgcgggcaaatgcccataaaataacatctcaggatgacatcactgctcctgggagacagcctctcagtgacttagggtttgtatgagattcaccagtgtccttgtttgatggctgttttcagtccatgacagacctgttaaaagaccacttatacaaagcaatagctaacttctgtaatggttacagattattactgaggtaaaaaacagaatgcttgtgggtttgtttgttgtctgtctggtttttccccccataaatgctttggggaatgagattcaggttttctagaaaagtcctgtatttacagttatgagccctggctgttctcccagaggacctaggtttagtttccagcacctacatggcagttcacagctgtaattccacttccaggggatctgacactctcacatggacatacatgcacctcacatgtactcacacacacatacaaaacaccaatgcacatgaaatgcaaataaatttttaaaaattatttgtcttttggatggagagagtggttaaaagtacttaattgcttttattgaagacctagacttggttcccagcacccacatcaaggtagctcacaactgcttataactccaattctagtgatggggtgtagtggcacacgtctgaaatcttagcattcaggaagtggagcaggacagttgtaagttagagaccagcctgaactccataagaagttacggtccctagtgggaggaaactcaatggctgtgcatttgcctggcacacttgagcaaatcctaacacctggccctctcccaaattgtccaaatattttccattccaatagttggcagttaaactatccagtgtgcttcataactgaagttagatgtcatttctcatggccctaatatttaagttccaataattcttggtataaaatgggaacaggttgcctctgtactgacctttagggaagtgaacccaggccccaggcaaccccaggccagtgaagtagcttcatcagggtggacgtgaaccctctctctctctttttttgtttgttttcttgagaaagggtttctttgtgtaacagccccggctgtcttagaacttgctttgtagaccaagctggcctggaactcaagagattcacctgcctctgcctcctgagtactgggcttaaaggcatatatcatcaggcctggcttgagctaaccctccttgatagatacattgaccacatggaattccatcatcccaatgcatggtagatatcaaagggaaggaaaggggaattattagtctcaaaattgataaattcctgataatagtcacacctggtagcacacacctataatctctgtgctgctgaggttgaggcaggaggatcatgaattcaaggtcagagtgggctacatagtgagttccaggcaaagtcttcaaccattactacagggtttgtccccctggaccagcagcatcagaattgttaaaaatgtgaatcccactccagagccaatgagtgagaaactttaagggtgggatcagctctttagggtcttacaagccttataggtgatcttagcttaagctctagtctcctaaccactacaccaggtctctggtttttaaagttggcaggtgttgaaattacctggggacctagagtccatgccaggggtgcttgctagagactggacccactgatttccatacgctaagcatatgctctattgaatgacaccgtagtccccatgcaaaggtttttggaggctccataggtagttctgtaatgcagttgtgtggcaatgtagcttttttactcaaaggatggtccttggaacacaatatcagcaggaagctgaggagaaatacacactattaatcttaccccaggcccactgaagcaaaatacacatttaattagatctctgggtggctcttctgcaccttgaagaatgagaagcctatgctgggttagagaggaacaggggtgttacattcatacctgttcttgtcccacagatgagccaaagaatcacagcttcaccctcactcaccacacttcacatattccatagtgcgcatgtggaaagctttcgggagctgtttctctttctactatgtgggtgggttctgggcaacaaaatttggtcatcaggtttggtagaaggcctctacctgctgagtcatcttagtgttcttcttccttctttaaggagagggttgtgtgtagctgaggtcttgaaattctatgtctatagccaaggataaccttgggttcctgatcttttgcctccctcttgagtgctggtctttcaggcatgagccaccgtgccaggttgatagggttctagagattaaacccagagctttgtgcatactaggtaagcattctaccccactatgctacctggccagatcatattcattatttatttatttatttatttcatgtatgttgtatactgtcactgaagagggcattggatccccattgcagatggttgcgagccaccatgtagttgctgggaattgaactctgaacctctagaagagcagtcagccctcctaactgctgagccatctctcccgccctcatattcattttgttaacatgagaggtagcactgttggacaggtagactgtgttaaaactccactttttatgtttaaagaggtgggtcagctgttaagagggcctgaatttggttcagcaccactatcaggtggctcccaaatgtctgtgcctccgattccaagagaatcctgagcctccaggcttctagggtacctgcactcacattcccacacaatatacataattaaaaattataaaattataacaagataaaaaacttcaggtcttagcttgaaatcaaaagcacattcattcagtcaaatctttgaatatataccacatagagctcttaagcagaactcaccctacactgtaaaatggacagtagtcatgaaactgataactgaattcattgctgttttccagcagctgggactgaggcagagcatcaatcgctcctggtcgctgcagcccatgtaggttccttccaccttgcctggatggctttgagtggtgggcgggctcctgtgagaatggagaggacctggtgtgggcatcagaccagtatcctgatcactgttttagcccagtggctggaaccacagtgttgagacacagttgtgtgtcatagacaattggcaggactgagccaactcaagcttctgtctataagtaaactatagtaaccatccctgactacaggtgattacatctaagacacactccactctaaacaccctccgtgtagcacttcccacatacattcacaaccatgataatgtttaatttatgaattatacattataataactataagagattgacagtaaaggctacagtagaaaaattataacaatatgttatactgcaaacttatttaacctggcaaatacctttattccaacactggggaggcagaggcaggcagacctctgtgagttcaaggccaccctggtctacataatgagttccaggatagccagggctatgtagaaaaaaaaaattagaatctgtgagttctggaattttttttgttattttgttttttttttttttgtttttttgttttttcgagacagggtttctctgtatagccctggctgtcctggagctcactttgtagaccaggctggcctcgaactcagaaatctgcctgcctctgcctcctgagtgctgggattaaaggcgtgtgccaccacgcccggctgagttctggaacttttatgtactgttttttgcactttagttgactcagggtaactgaaactttaggaacggaagcaggagataggggggactattccaaagcacattggtttatcttcatctttaacatcagtttccttcgctcatcctgaaatgctttttgttgtaggagagaaagggcccacagctaggctggaaatgcacaggtcctcaggagagccataggaccatgctgtacacctgagcctaaagaatgtgttaagggggtggctggcgagatggctcagtgggtaagagcactgactgctcttcaaccacatgatggctcacaaccacccataatggcatctgacaccctcttctggtgcgtctgaagacagctacagtgtacctatttataataataaataaatctttgggctggagcaaacagggactgagcaagcagggccaaccggagtgaacgggactgaccaggagcaagcagaggtcctaaaattcaattcccaacaaccacatgaaggctcacaccgcatgaagctcacaaccatctgtacataagtaaattaattaataactgttagctcttaagtgtaacagttcaactgctgagtggacagtttttggatagttttgagaaaaactaaaattgaggccagatattgtggcatactcccttaatcccaacactccagagacagaggcacatagatctctgagttcaggtccagactggtctccatcgagttccgggacagcctggtctacagagtgagttccaggacagccagggctacacagagaaatcctgctccgttaattattaatgtgactatatatgtatctatgtatacatacacacatatacttatatgcacatatatttatatgtaggaaaataatgtcagcacagtttatctttaaccagccagttccccaacgacaccaagagactatgatctactgacttttttttctttttttcctttctctttctctctttcctttttttttttgtttgtttttgtttttttttttttgtttttttgagtcagggtttctctgtgtagccctgactgtcctggaactcactttgtagaccaggctggcctcgaactcagaaatccccctgcctctgcctcccaaatgctgggattaaaggcgtgcgccaccactgcccggcctatgcacagcttaaaagcacagtattgagcagccattcctataaggtagtctggatgtcttcctgccaaagtccccacaacccttgcatttgggcgttctcgctccagcagagcccttggtacctcttggacccctcctgtggttggtcttctacttcctctttccttcccctcccctagctgggatcaggactctccctccacccagcactgctggccagcgtttattgacaaggcagagaactaatgctgagcactgtttatacaaacaggaggccggagtttcccaacacaagcattacaatgctgccctgtccccattgaaatgaagtagtgaggtagaaaaaccagcatttggataacaagcgtaaactttacacagtgtacaaaatcatgctgtcaggattgctcagaaaaacaaaaacaaaacgacaataacaacaaagggcaggcatgtgtatgtaaatacaattccagccctgaggaaggagccctggggcttgctggccagccagcctagcctagttggacagacctaggccaatgagaaatgggatctcaaatggtgcctaaggaagagctgcaccagtttgcttgccctcttgattccacatcacacaatgttcttggtctgaactcttggctctgtgattctaatcaagcaaggtagaaagggctgcagaaatgactagggggttaagagcactttctgttcttcccagaggactcaagttgagtacccatgaccacctgtaagttcaactccagtggatccgatgccctcttcaggccactgagggcatctacacaagtgtgatatacacacagcagagtaaaaatagacacatttttatatacccctgaatatcaggaacagagactaagaggctcacaaggttgggtttgcttggtgttgaggtcaggaagaaaacgccctctgcaggctcatagcaggcaacatgtggcataaacagcattgtagactgcttcctggcaacatccatgttcctgacagtcattagttcctaaggtatgtatttctttgggtgtacgtagtgtctgtaggccattacagcagcacatggttcagtaaacagtctcacagggcacagtgtagtccaggtttgtggttgttcctcatcaagcttcatactcattttatgtgtatggctgttttgtctgtatgagtatctgtaccaagtgtgtgcctactgccacagaggccagcataggtatcatctgagtttcaggaagttaggagccactgtgtgggtgctgggaatcgaaaatttaaaagaaaaccccataacatctgtgccccacacacatgtcttacccacagaagcgtaagagggtatcatgttcccagcactggagatacagttgctagtcaccatgggattgctgggaattgaaccacagaccattgaaagagcagccagtgttcttaaccactgaaccatccagcccaatatccatctttttttttttttttttgagacaggacctcagtggcttggagcttgccatgtgggatagtctggctggccagtaactcctagggatctgcccgtctctccttcctcagcactgaccttacaagcacacacctccacagctaggttttatgtgggttctgggagtcaaggccaggtcctggtgctgccaaggaagtacattaccaactaagccatctcccagtcctcttcattttcatttaaagatgtgtgtgtgtgtgtgtgtgtgtgtgtgtgtgtgtgtgtgagagagagagagagagagagagagcgcacatgtgtggagagcagaggacaacttgctggagctggttctctcaggctatcaggcttggtggcaagcaccccccatccatgctttatctttgtttttcttcctttcagattttgagatacagagcgagaatggggagaactcaaatgaagacatgtttgagggtgtggagtcacatgggatgttcttgaacatctctggaggggaaggtggtcagcagtctgatggggacagtgactttgagagagactgtggctctggaggcgcccagggacatgccccgggtgaggaccccagggtcgtgccatcggaaggaagggaagttggccagctaataggccttcagggcacctacctgggtgagaagccgtatgaatgtccccagtgtgggaaaacttttagccggaaatcccaccttatcacccatgagcggacccacacaggagaaaaatactacaaatgtgatgaatgtgggaagagctttagtgacggctcgaactttagtagacaccaaacgactcacactggagagaagccctacaaatgcagggactgcgggaagagctttagccggagtgcgaaccttatcacgcaccagaggatccacaccggcgagaagcctttccagtgtgccgagtgtggcaagagtttcagcaggagccccaacctcatcgcccatcagcgcacgcacacaggggaaaagccgtactcgtgccccgagtgtggcaagagctttggcaaccggtccagccttaatactcaccagggcattcacaccggagaaaaaccctacgcgtgcaaggaatgcggcgaaagcttcagttacaactccaacctgatccgacaccagagaatccacacgggagagaaaccatacaaatgcaccgagtgcggccagaagttcagccagagctccgcgctcattacgcaccggagaacgcacaccggggagaagccctatcagtgcggcgagtgcggcaagaacttcagccgcagctccaacctggccactcaccggcgcacccacctggtggagaagccgtacaagtgcgggctgtgcggcaagagcttcagccagagctccagcctgatcgcgcaccagggcacgcacaccggcgagaagccctacgagtgcctcacgtgcggcgagagcttcagctggagctccaacctcatcaagcaccagcggacgcacaccggcgagaagccctacagatgcggcgactgtgggaagggcttcagccagcgctcgcagctcgtggtgcaccagcggacgcacaccggcgagaagccctacaagtgcctcctgtgtggcaagagcttcagccggggctccattctggtgatgcaccagcgagcgcacttgggagacaagccttacaggtgcccggagtgcgggaagggcttcagctggaactccgttctcatcatccaccagcgcatccacacgggagagaagccctacagatgcccggagtgcggcaaaggcttcagcaacagctccaacttcatcacacaccagaggacgcacctgaaagagaagctttactgaagtggcagaaaagagaaggaagtgctgagctgactctgcagggagattgtatcaggtcaggatgatagatctcccagtcggagtcatctgtaggaagtcggagcccttcagaacacagtctgaggaagtatggcctgagactgatgtcccgctgtctcttccattggttagagggacagtgactgccaggaagagtgtcagcttagatgtgtgtgcctgtgtgtggagcacacttggacacacacagttttatgtttggaactcgaggcctctgacctccagcagtcccatcagagtgaaaccgtcgtgcgtgctgtgcactgtgtacacaatcactcttgtacttgtttgttccctgcataagtacctgcaaacacccaacacacacacacagagtgtatgtatcacatagaacgcaggctggccttgaacttatgatgtagctgaggatgaccttgaacttctgatcctcctgcctccaccttctgagtgctgagattaccaggaagtgccaacgtggcgggtttatgttgggcttcaaatcaaacctttgtgcatgccagggcatcacactactgagccatatcctcagtcccatacatctttcagtgtgtgtgtgtgtgtgttggtgtatgtgtgtggtgtgttggtgtgtgtgtgtgttggtgtgtgtgttggggtgtgtgcaggtacttatggagccagtgattaacctccagtgtcattcctaaggcactgttcacctgggagtttttttgagacagagtctctcattgaacctgggactgctcaggctcggctcctggctagacagcctcaggaactgcctctcctgtgtgagggttccaagcatgtacctccacacatgccattgagcataggtgctggactgatctgagagcctcaaacatttacagtgtgtacttgaccgattgagctatctcatatatttttaactttatgtgtgtggatctagcttactgccctgcagttttgtataccaagggtgctctttttaaggacgtgtcaattttgagggtattagaaatctcattgtggggctgatgaaatggctcagcggttaagagcacttactgctcttccagagcatcacgtttcagttccagcacctgcatgacagctcccagccatgtgaaccttcaattctaggaatctgatgaccttctggctctcattggtactctctgcacacggtgcagatacatatatggcagccaaaacacacacacacacacacacacacaaatccttcaaaataggaaggaaggaaggaaggaaggaaggaaggaaggaattccctagtgaggtttagtcttgaatcaggagtttgctctgcagaaccagatgtaatcttagttactaccaaccagggctttatccttaggatcccaaggcgtgaaaggtaaagagaggaaagctgactggagaagtggtgttactgttataaggagaggggagtagacgcagaatctgagaagtgtgaagctatcacctgatatttaggaggtttatgcttggagggggctttcttttcttttcttttcttttctttttttctttgtttttttgtttttcgagacagggtttctctgtgtggccctgactgtcctggaactcactttgtagactaggctggactcgaactcagaaatctgcctgcctctgcctcccaagtgctgggattaaaggcgtgagtcaccacgcctggctggagggggctttttaaaaagggcgttgactattgccaagtggagccccattcttttcctgactgtgcctttaaaaaaaatcgggttgagctatctagttccgactagcctatttcttttttttttttttaaaggatttatttatttactttacatgtatactttatatgagtgcactgtcactatcttcagacacaccagaagagggcatccgatctcattacagatggttgtgagccaccatgtggttgctgggatttgaactcaggacctccagaaaagcagtcagtgctcttaaccactgagccatctctctagctcccagactagcctatttctaaacctcctatctcagcctcttgagtgctgggattacatacatgcttgggtttccatggccagctcctgagtcttatcctctaatgtgtattaaaaacttgaacttggccaggtatagtggtgtgtgcctttagtgtcagcactcaggagcctggagcaggcagagctccatgagttcaataccatagagaactcacatagtgagttctaggatagccagggttacatagtgagacccaggggaaaaatataacctaaccacgactattagcaaacctttccctcacttccatatcctatccacctcccactgcaggccggaaataacctaagactttcaggaaggaaaaattagttgtttcaaagacctgggctgtggtggcacacacctaatcctagcacttgggaggcagaggcaggtggatttctgagtttgagcccagactggtctacaaagtgagctccaggacagccagggctaaataggaaaaccttatctagaaaaaacaaagcagaaagaaatggaggacagatagacggactgacatattattgggttagattcttatcactgctgtttgtgaaccatccatcatgcttgtcacccaagccaggtgtggtgcctcatgcttgtcaacccaacacttgggaagcagaggtaggaagatcacaagtttgaggccagtgtgacctgtaagtccaggccagctttcggcacctgtcttggcatggcacatctggctaagaaatgagagaacactgcgaatcatctctagtcagactcagttaatgtagacagcagggaagttcttggcagtgatggtggactgtggagccagctaggtggttaggctggtcattgattctatcccttggcttatttaataaaggatgcagtgtcattgctgtgctcaatgttaggaaactataaagtcctattaggtgccagataacagagacttgggtgcaccccggaaggtgcaggagctcctgtcagaaaggcagcatagctagaatagtttctcagctgacattaagtctcccgtgtagcccacactggtcttaagcaaagggacagaacgtaccgtgccaagccttctgcctctgcttcccaggtactggcactgcagttttatatgccaccatgccatctcctttcacacgttaatccactctataactttagcctgagacagtccccttgctttaaagatcttactgagatatgacagataaatacataaaagtgtgcagcttgccttagtttcacaagctgcacacacttaaacaagcagcacccagatccagaaacaactgagcatcgataaccagatgtgccaccttgtacctgccttaagtttatggtgtggtagagcctggggggcttctcagacctggttctaaacagacttgtgttgcacagatctgcttttactatacagttgagtcaagtcatagtgaggcggcctctccatggaattctatggaattctacatttatggttcccaatgccatagtagcttctagtgtgagcgaaaggtacaaagctatgctcttactgtcctctctctcagtgacaactccgaggtaagtaagcagcctcactctagggacagactggagacctggggtgtgtggcaggtccatcattagcacctgctcatcctgtgggcacttagctacattgtactagtttcttttaaatttttatttttgcttttttttatatgaggcaaagtctaggagtatagcccaggctggcctcagatttgtagatctcctgtctcagcctcttacactgggcattccaatttgttattaaagctgtaagaaaggacatggtggccaggctgtggtagtgcatgcctttaatgccagcatgtggaaggtagaggtcagtggatctctgtgagctcaggcagacaacctcagctcagtcccttggtcccatatagtgagagaagaaagccagctcccagatgtcgtcctctgacctccgcgtgtgcaccactgtacacattctctacccaccatgtaaaatgtttaagtttcaaaagccaaagcaaagcacaagacactaagaagaacagggatgaaaggaatggatagtaaaaagtggtacattagctagatttaaatctttttctagctagcaggattggcaataactgattagtccttgcaagttaacaaccatcatttttcctggccctttacccctgactggggctgggaggggctggagggggtagagagggtggggaggggtaatcgctaccctctaaccagctccatagcgcagctgccttgttcaacccactctctcacgtggttggggagatctttacatggatgtcccttaagtagaccttttcagatctttgggtaaaatatacatctttctttctttctttctttctttctttctttctttctttctttctttctttctttctttctttctttcttcctgtctgtctttcttatttatttatttatttaattttatttatttatttatttatttattgtatatgaatacactgtagctgtcttcatgcgtgccagaagagggcattggaccccattacagatggttgtgagccaccatgtggctgctgggaattgaactcaggacctctagaagagcagcctgtgcgcttaactgctgagccaactctccagtccaaaatatgcatctttcacttttgcacttctgataaaattaccccaaagccatggaagaaatgagtgtatgattttgtgaatgaaggagaggagttgagacagagatgaattccctttggttttccacattccctacccgagccccttgtagcctaggtctggagtcctttggtaacctgaacaaaggctgtcaccctggggcctgcttgtccttgggtttctctctactgctcacaccttgatgtctcaactctgagttgaacatctgcttgaagctgctgtgggagaaaggctactgagggaaagggctcactgcaggggacagtttgcccagtcattcctccacagcttgctgtgaaccctgtcaaaggagaagcgctctgtcaactgcccaaatgccct

SEQ ID NO: 1602 - DNA, 2094 bp, Mus musculus
gttgtttcttgttgagattggaggaaagacggccttctcagagagcctgactggagacaggtgttaggcttgaagccttcgtgaccatccaggaagttggacaatggcagccgaagtgccagcagtgagcactcccctcagccctttggttcaggtacctcaagaagaagatgaacaggcagaggtcaccactatgatcctggaggatgacgcgtgggtgcaggaagcagtgctgcaggaggatggccctgagtctgagccctttccccagagtgctggaaaaggcagcccccaggaggaggacgcagccgagggaccccagggtgctcttgtccgatttcgggagctctgtcggcgctggctgaggccagaggtgcacactaaggagcagatgctaactgtgctgccaagagaaattcaggcctggctgcaagaacatcggcctgagagcagtgaggaggcagtggccctggtggaagacctgacccagacttttcggcacagtgattttgagatacagagcgagaatggggagaactcaaatgaagacatgtttgagggtgtggagtcacatgggatgttcttgaacatctctggaggggaaggtggtcagcagtctgatggggacagtgactttgagagagactgtggctctggaggcgcccagggacatgccccgggtgaggaccccagggtcgtgccatcggaaggaagggaagttggccagctaataggccttcagggcacctacctgggtgagaagccgtatgaatgtccccagtgtgggaaaacttttagccggaaatcccaccttatcacccatgagcggacccacacaggagaaaaatactacaaatgtgatgaatgtgggaagagctttagtgacggctcgaactttagtagacaccaaacgactcacactggagagaagccctacaaatgcagggactgcgggaagagctttagccggagtgcgaaccttatcacgcaccagaggatccacaccggcgagaagcctttccagtgtgccgagtgtggcaagagtttcagcaggagccccaacctcatcgcccatcagcgcacgcacacaggggaaaagccgtactcgtgccccgagtgtggcaagagctttggcaaccggtccagccttaatactcaccagggcattcacaccggagaaaaaccctacgcgtgcaaggaatgcggcgaaagcttcagttacaactccaacctgatccgacaccagagaatccacacgggagagaaaccatacaaatgcaccgagtgcggccagaagttcagccagagctccgcgctcattacgcaccggagaacgcacaccggggagaagccctatcagtgcggcgagtgcggcaagaacttcagccgcagctccaacctggccactcaccggcgcacccacctggtggagaagccgtacaagtgcgggctgtgcggcaagagcttcagccagagctccagcctgatcgcgcaccagggcacgcacaccggcgagaagccctacgagtgcctcacgtgcggcgagagcttcagctggagctccaacctcatcaagcaccagcggacgcacaccggcgagaagccctacagatgcggcgactgtgggaagggcttcagccagcgctcgcagctcgtggtgcaccagcggacgcacaccggcgagaagccctacaagtgcctcatgtgtggcaagagcttcagccggggctccattctggtgatgcaccagcgagcgcacttgggagacaagccttacaggtgcccggagtgcgggaagggcttcagctggaactccgttctcatcatccaccagcgcatccacacgggagagaagccctacagatgcccggagtgcggcaaaggcttcagcaacagctccaacttcatcacacaccagaggacgcacctgaaagagaagctttactgaagtggcagaaaagagaaggaagtgctgagctgactctgcagggagaactcccacagtgtccctccccacaaccctccccccacaacccccctcccccccgcccgtgttgtccctttaaaagaaccacttttcctaaataaaaaaaa

SEQ ID NO: 1603 - DNA, 1845 bp, Mus musculus
atggcagccgaagtgccagcagtgagcactcccctcagccctttggttcaggtacctcaagaagaagatgaacaggcagaggtcaccactatgatcctggaggatgacgcgtgggtgcaggaagcagtgctgcaggaggatggccctgagtctgagccctttccccagagtgctggaaaaggcagcccccaggaggaggacgcagccgagggaccccagggtgctcttgtccgatttcgggagctctgtcggcgctggctgaggccagaggtgcacactaaggagcagatgctaactgtgctgccaagagaaattcaggcctggctgcaagaacatcggcctgagagcagtgaggaggcagtggccctggtggaagacctgacccagacttttcggcacagtgattttgagatacagagcgagaatggggagaactcaaatgaagacatgtttgagggtgtggagtcacatgggatgttcttgaacatctctggaggggaaggtggtcagcagtctgatggggacagtgactttgagagagactgtggctctggaggcgcccagggacatgccccgggtgaggaccccagggtcgtgccatcggaaggaagggaagttggccagctaataggccttcagggcacctacctgggtgagaagccgtatgaatgtccccagtgtgggaaaacttttagccggaaatcccaccttatcacccatgagcggacccacacaggagaaaaatactacaaatgtgatgaatgtgggaagagctttagtgacggctcgaactttagtagacaccaaacgactcacactggagagaagccctacaaatgcagggactgcgggaagagctttagccggagtgcgaaccttatcacgcaccagaggatccacaccggcgagaagcctttccagtgtgccgagtgtggcaagagtttcagcaggagccccaacctcatcgcccatcagcgcacgcacacaggggaaaagccgtactcgtgccccgagtgtggcaagagctttggcaaccggtccagccttaatactcaccagggcattcacaccggagaaaaaccctacgcgtgcaaggaatgcggcgaaagcttcagttacaactccaacctgatccgacaccagagaatccacacgggagagaaaccatacaaatgcaccgagtgcggccagaagttcagccagagctccgcgctcattacgcaccggagaacgcacaccggggagaagccctatcagtgcggcgagtgcggcaagaacttcagccgcagctccaacctggccactcaccggcgcacccacctggtggagaagccgtacaagtgcgggctgtgcggcaagagcttcagccagagctccagcctgatcgcgcaccagggcacgcacaccggcgagaagccctacgagtgcctcacgtgcggcgagagcttcagctggagctccaacctcatcaagcaccagcggacgcacaccggcgagaagccctacagatgcggcgactgtgggaagggcttcagccagcgctcgcagctcgtggtgcaccagcggacgcacaccggcgagaagccctacaagtgcctcatgtgtggcaagagcttcagccggggctccattctggtgatgcaccagcgagcgcacttgggagacaagccttacaggtgcccggagtgcgggaagggcttcagctggaactccgttctcatcatccaccagcgcatccacacgggagagaagccctacagatgcccggagtgcggcaaaggcttcagcaacagctccaacttcatcacacaccagaggacgcacctgaaagagaagctttactga

SEQ ID NO: 1604 - DNA, 30000 bp, Homo sapiens
tttgaagccaaagccaggctacacagagatgaggctcctgggagggaacaggtgcagtcctgctcaggctgcagtgtccctgggctacagctggacaagggctccctctgggtcacagcctctagggacagagtttggggcaggttgactgtctgatttgtaggactctggtgatgagctcagctgggaaactgtgtggtaatgggaagagaatggttttgcttttccaaatcatccaccctctgcatgctttgatccatactggaactcagtgtggaaacagtgcctttgaacagcctaagcctaaactctgggctgtgtgtccagtttcctggcctccagcttagttcactccttaccccgcccatcactgataccagatccatcctcccaaatatcctttcatcatgttacctccctaccacctcatggcaccttcaacacaacaggaaatgtctccaacctcagcctggtattcaaggttctttctgatgtggcccacctctcaccactccaccacatctccctgtgggccctgccaaactggatcattttttttctatccatgagctgtgaactttcccacctccaaattgttgcttatactgtgtccttcctctgaatgttctcttcctccctctcccccagtccaaatgctatagactgaattgggtctccccaaaattcatacattggagctctgatctgctatgtgattgtatttggaaatagagctcttaggagataattaaagttcggtgagggaggaggagcagatcaagatggctgaatagcagcctccaccaatgattctccttgcaggaaaatcaaatttaacaactgtccacagcaaaaaagcatcttcataagaaccaaaaatcaggtgaggactcaaagtacctggctttaacttcatatcgctgaaagaggcactgaggagggtgggaaagacagtcttgaaacactgatgtcacccctcccccatccctcagcagtggccgctgtggtgctgagagaatctgtgcacttgggagagggagaatgcagcaactgtgggactttgcactgaactcagtgctgccctgtcacagcagaaagcaaaaccaggtggaactctcatgacacctgcccatggagggagcatttagaccagccctacccagaggacttcacccatcccagtagttaggaggcttgaggcttgggttttgacaagccttggcatggcaggctatcatgctctggggccctaaataaactttcaagccagtctagaccataaggacttcaactcctaggcaattcctaatgccatgctgggctcagagccagtggactcggggcacacaacctagagagacaccaggcaagggagccaagggagggtttgcaccacccctcccccaaccccaggcagcacagcttgcagcaacaaaagtgacttcttccttttgcttgaggagaggagggggaagagtaaagaggactttatcttacatcttggataccagctcagccacagtaggatagagcactagtcagagttgagaggcctccattccaggacgtagctcctgaattacatttctagatacaccctgggccagaagggaacctgctgccttgaaggaaagaacccagtcctggcaggattcatcatctgctgactctagagcccttttgacccaaataacctgcagtgatacccaggtagtatgctatgggcctggagtaagactctgaggcatgctggcttcgggtgtagacccagcatattcccagctatggtggctgtggtgagagacttcttctgcttgagaaaagcagagagagatgcacaagggactctgtcttgcagcttaggtacctgcctggccacaatgtggtagagcatcaaatgggctcttgtggtcactgattctaggccttggctcttagacagcatttctggacctgctctgacctcaccctgaagggtgagtcccaggcctggaagcattcaccacaagcaactgaagagcccttgggccctaagtgaacatagccagtagcttggcagtactcgctgtgggcctgtgggggtggccacagggtgaggctcctctgcctgtggaaaggggaaggaagaatgggaaggactttttcacatggtttcagtgccagttcagccaccatagactaaagcaccaggtaaatttctgaggtttttgactccagtccctggctcccagacagcatctctggacccgccagggcctgagggaactcattggcctgaagggaaggacacaaacatggctggctttgccacctgctgactgtagagccctaggccttgagtgaacataggggatagccaggtagtgtttacagcaggctttgagtgagacccagtgctttgctggctttaggtctgatccattgcagtcccagtggtggtggccatagggatgttgtgtcagcccacccctagctccaagtggctcagcagagagagagagactgagactgtttgtttgggagaaatgacaggtagaggataagaatctctgcctggtagtccagagaattctagatcttacccaagaccaccaaggcagtacctctatgagtctgcaagaaccatagcattactgggtttggcgtgtcccctaatgcagatacagtttagatcacaagacccacatccttcaaatacctggagagccttcccaaggatgggtacaaacaaccccagactgagaagactacaataaatacataaatcttgaatgctaaggcactgacaaacaactgcaaccatcaagaccatccaggaaaacatgacctcaccaaacaaactagaggggcgaatcctagagaagcagagataagtgacctccagacagataatttaaaatagcagttttggggaaactcagagaaattaaagataacacagaaaggattcagaattctataagataaatttaacaatgagattgaaataaaaagaatcaagcagaaattctggagttgaaaaatgcaattgacataatgaagaatgcatcagtctcttaattgtggaattgatcaagcagaagaaaaaattagtgagcttgaagacaagctatttgaaaatatacagttagagaagacaaaaaaaatttttttttaatgaagcatgcccacgaaatctagaaaacagcctcagaagggcaaagccaagagttattggccttaaagaggaaacagagaaatagaaagtttattcaaagggataataacagagaactttccaaacctagagaaagctataaatattcaagtacaagaagattatagaacaccaagcagatttaacccaaagaagactacctgaagacatttaatactcaaactcccaaaggtcaaggataaagaaaggatcctaaagcagcaagagaaaagaaacaaataacatacaatgggactccaatacgcctggcagcagactttctgtgaaaaccttacatgccaggagagagcagcatgacatattttaagagctgaaggaaaaaacttttaccctagaataacatatccagtgaaaatgtcctttgaacatgaaggagaaatagactttcccagacaaacaaaagctgagggatttcatcaacaccagacctatcctacaggaaatgctaaagggacatcttcaatcagaaacgaaaggacattaatgagcaataagacatcatgtgaagttacaaaactcactggtaatagtaagtacacagaaaaacacagagtattataacacggcaattgtgcaaacaactcttaagtagaacgactaaaagatgaaccaaacaaaaatagtaataagtacaacaacttctcaagacatagacagtgcaataagatgtaagtagaaatagcaaaaagttaaaaagcaggacaaattaaaatagagtttttattagttttctttttatttgtttcattgtttatttgtttgttcctttgtgcaagcagtgcaaagttgtcatcagtttaaataatgggttataagatggtatttccaagcctcatggtaatctcaaatttaaaaatatgcaataaatacacaaaacacaaaaagcaagaaattaaatcatactaccagagaaaatcaccttcacaataaggaagacagaaagaaaagaagaaagagaagaccacagcaaccagaaaacaaaatggcaagaataagtcaatactaacattgaatgttaatggactaaactctccaatcaaaactgttatggaaagaactgttatggagcagttctccccattcccacccacatcatttttcatcaactctagatgagctaagggcccccaaatgccttaggctgagcattccttggggtgaggtcccttcttgctcagagcctaaagacaagtagtgatattgtttctgcctgtccagtgtttcctaacaggccttcagtctccagagtggagaatctgcctttgtgtggggtattagtaagaaaatctaggagccacatccaatcctctctcaccctgctgcatccagggaatgtgcatgtgacttagactcaaccaaccaaatgctctttccttgcatgggagaatttgtgtgagaaaggcggagaaacagagatggctgtagtaccaccagaggtcatgggataggcaagctgaactttttctgctcagagactgttattgtggtttttggggacttcctctttgtctcttggctcctaactgttctcaagcctgattcgtcagctcccttctactctgtcagttccctgacagtctttcagtaagtcccttttacttaagttagccagattagttcttaagcttttaaccaagaatgctttctggtggaacagagcctctctcacccttgtggtttggccaatggagaaaggactctcttgggggagcaaccttgaacttggctgtgtttccaggcttgcttcgatgtagcaggctggtcttagggtactggcttggctaccagggcccttctcagtaggatcattatgccatgaattggtcttaaatgtgactttctctctgtctcatgtaggatagttgacactggcaaggaccagcttcccagaatcagacacagaggagacagcttctttaggactctccagtgacaagctagtgccagttctgtggtcaagggttgacatgggttaggaacagaggtaaataaacgcttgagctgctggaaagttccatctgtgcatccccagcctcccctgcatcttttcctttttgtgtaaatttccattcctggtaaggatggacacatggagaaacccatcttttttaatacaatgtcatcccaaaaaaaatcacttggaggggtggtggcccagaattctgcatccaggggcttagtgcagacttctcaggctggcctggaggtggtgctatttgcatgtggtcagtctgggataataaagatgctaccagggtattggataagaatcactagctgaacttcactttgcatctctgtaattggattcaagaggttaattagtgaaaaacaggtgaatttcacataatctttggagtggtgcagaggactttctaacacaaaactcacaggctataaaaagataagattaacaaatttgactgcaaaaaaatttcaaatttctatatttaataaaccagcagaaaacaaacagcaaactgagaaagagtagcaactgctgtgacaaagggataattttcttaatatacaaagagctcttacaaataaatccaatttaaaaatgggaaaaggaccgggcacgtggctcatgcctgtaatctcagcactttgggaggccaagacggctggatcacctgaggtcaggaattcaagaccagcctgatcaacatggtgaaatctctgtctctactaaaaacacgcaaaattagccaggtgtggtggcgcacgccggtaatcccagctacttgggaggctgaggcaggagaatcacttgatccgagatcgtgtcactgcactccagcctgggcgacagaggaggaaaaaaaaaagcagtcatttcattgcaggtgcctccagtaattgctcagtgcaaacatacataactattctatcacagaccattaagggtgtctctctccatttttagattttccgcttgagtttccaggtagtttctcacctgttttcaagcagggttggggcagccgtttcttcaacagcgccagccgtaaaacacaaagatggaggccaacctcccacacccgggcaccctcccttcccccatactgagattgacaagtaagcaacccggtgatcagtactaaaatggagacgtcagccaggtgcggtggctcacacctgtaattccagcactttgggaggctgaggaggaaggatcgcttgagcccaggggttcgaggtcagcctgggcaacatatggaaaccctgtctctatgaaatgtagatcctgtctgtgagtgtgtgtgtataaataaatatatatatatatatacaaatacatacatatatatatttaaaaaataaaatggggacgtccaacacgtgtactaggggcggtgtctctgcctggggaggtggtgatgacagggcaggctccacccaggagaagctggaagaatgggagttccgcggcagaggaggcggggcagggcgttcctccaaacacaggaataccacgtgcgaaaacaaaggggtgtgcgaagaccgggtgcatgtgtacagctgcaaactgggggaaaggcgccaggcttgggcgatgaggatttgttcccccatggattcccttcctgcccagggtccgctctcgccggtcgagggtgcctaacaatactccttgccacaaggttcgcagccgaaaaggtccttcaagtccggccatccaactttcactttttatagacaaatatacagaggccttagataagtgaaacggcttgtctcgggttacagctctagccaacacagggtttctgacggtcagtctgcggattttcctgcctctggtccgcaggcactgcccaggctgtcagccccaaaccctactccggggaccgcggtcaggttcgtctccgggcggactacatctcccacaatgccttgggcccagcctccctcctgccgcccggctgggtgccgtctccaccaacagaaaggcagaatttccagggccgttctcggcagccaatgagcgcggcggtgggcgggcctctcccgtccattgttctcggtgccccacgggcttgagccggggtgaatctggaggggccgggccgagcccgggggcgctttcgcacgcgaagcaaccgctagagcaggacctggtctcccgagaggtgagccggagaggcaggcctggagccacgcggaccccgggcagtagcccgaggtgagggaatagtgggcctggagccagctgccggcagctctgctgggggaggggcgtcggggtcgcgctccgtatcctgcgggccctgcagccccgatttacgcgccggctccgctcagcgaaccgtcccggacgcgtctccctggcggagagctccttgcctctcctaccgagaagcgcaggctttggacgggaaggggcattcgacgacatcccgcgcagcgtacacgttttacagatggggaaactgaggttcagagggggcgtgtcgtgccccaagtcagaccgcaaattagctgacctggcacacttttcccaggctcccaagtaggaagagttctcttacaccatatgccagtatttcttctagtcatttgagtaaatacacgttgagagcttcggttttcccactagcttttattttttgtccttttttttttaagcttttgtcagcttttctccccttttcattgagggagggttgttagttgagtctttatgatgtagtaatgattttttaaaaaatttttttatttttgtagagactgggtctcactctgttgcccaggttggtcatgaactcccggcctcaagccatcttccctcctcggcctcccaaagtgctggaattacaggcgtgagctacagcgcttgggctaaaaataattttgtattgcttttataatattttaagtcgtttgcaattccactgctttcaatattttgtaggtgccgtcccgttcttttttcctgtgagttcatttttttttttttttttttttgagacggagttttgcttttgttgcccaggctggagtgcaatggcctgatctccgctcaccgcatcctctgcctcccgggttcaagcgattctcctgcctcagcctccggagtagctgggattacgggcatgcgccaccacgcctggctaattttgtttttagtagagacgaggtttctccgtgttggtcaggctggtctcgatcttccgacctcaggtgatccgcccgcctcaacctgccaaagtgctaggattacaggtctgagccaccgcgcccggctgtgagttcatttttaaagggaattgaggacttactgtgtctatggtttttctgccctgctgattttgtgtttatccattattttcctatcagaaggattatcttaaatcattaatgattaatctttgtcaatataatttttaaaatattaaaaacatacagcgtaatgtgcagatcttaaatttcatatgtttgctcttgtgccgccattgccaaatgaagatattgaaaatttccatcatcccagaaggctcctttgagcccctttcctgtcattaccacctaaaggtagccattattatagcacagtttcttttcttttttttccttttcttttctttttttttttttttttttgagacagagtctggctctttcgcccagactggagtgcagtggcacgatctcggctcactgcaacctcctcctcccaggttcgggcaattctcctgcctcagcctcctgagtagctgggattacaggcgcccgtcaccatgcctggctaatttttgtatttttggtagagacggggtttcactatattggccaggctggtctcgaactcctgacctcaagtgatccgcctgccgaggcctcccaaagtgctgggattacaggcaaccacgccaagcctatagcacagtttctaatacatgctgctatatgggtgtgtcatagtttattagccattccctgctgctggatttttaaggactcgattttttggttatttttttaagataaagtactgaggggccgaggctggattggagagtatatgcatgttttaaacttcatacttaaagtatggtaataatgcagttgagatattgcctttcttccaaagaagctcagagtgctttgacatctgatccattgctgatccttaagatgcccccataaaaacagaaacatgagtgttattatctttattaggtggtcaccgagtttggtgactaagttgtatgttaggtcaaggtcacacagtgcaagtcgaaactgacttaggagagtcctcagtatttcagtcatgggtttttcccggggactttgcatttctgatactcattctttggtgttttggaaggaacaatgctgtattttttgtgcttgggatacttttttttttttttttttgagacggagtctcactctgttgcctgggctggagtgcagtggcgagatctgtgctcactgcaacctccgcctcctgggttcaagagattctcctgcctcagcctcccaagtagcaggaactacaggcccccgccaccacgcccggctaatttttgtatttttaatagaaatggggtttcaccatacctcaggtgatccgcccacctcggcctcccaaagtgctgggattacaggcatgagacactgcacccagccttcttttaccacagagagatgttttcaggaataagccattttttctttaagaagaacaggaaacgtctgttggtttgcatatgtaagggccacttggtggtctgacctgggcttttgtgagttagattgctttaggacagtctacctatggattatggttctcttttttgtttctcagcgggactacttgttgatatttgaggagggaagtgtcttacctgagagcctggctggagaagactgaggtccaaggcttgaagcctaagtgattgccccaggactgtggatgatggctgcagacatcccgagagtgaccactccgctgagctccttggtccaggtgcctcaagaggaagatagacaggaggaggaggtcaccaccatgatcctggaggatgactcctgggtgcaagaagctgtgctgcaggaggatggccctgagtctgagccctttccccagagtgctggcaagggcggcccccaggaggaggtgaccaggggaccacagggtgcactcggccgcctccgagagctctgccggcgctggctgagaccagaggtacacaccaaggagcagatgttaaccatgctgccaaaggaaattcaggcttggctgcaagagcatcggcctgaaagcagtgaggaggcagcggccctggtggaagacttgacccagacccttcaggacagtggtgagacgcagaacctcatagggagagggcgggagcacccttccaaggtagaggagtgtggtgtttcggaggaggagaaggtggtgtccaaggcagagtggggggctagcgccatccctctgctctgtctgcaggcagtcagcgtgttcatcagccttttagtgtcctcactgtgtgcaaagtcagctccagaagtgctaggagggccttagagctacatttgaattgtaagcacagtttttacttctgtgtttatttggagtggttgggaaggtgatggaagttaaacgggaggagatggagacccctggcaccttcacgtggttgtgcaagaaacatccaaatggttcttgcaattagagaaaacaatctgatattttcaacatgacttttttttcttttttctttttttttttttttttgaaacggagtctcgctctgtcacccaggctggggtgcagtggcacaatcttggctcactgcaacctccgtcttctgggttcaagcagttctcctgcctcagccttttgagtagctggaattacaggcgtgcgccaccacgcccggctaatttttttatttttcgtagagatggggcttcaccatgttcgccagactggtctcaagctcctaacctcgtgatccgcccacctcagcccccgaaagtgctgggattacaggcgtgagtcaccacgcctggccccaaagtggttatttttatgaaaccaagagaaatgacaagtaaaccagctaataactagggactttctgtggtataaagtaatcctgggctcttaaaatcgtaatttcaaacttgagctctttgcaatagttactctatttttttccggtgttactaataagtattgggattctggcttgccgtttaaccgctgtctccctcctggttttccattgtaaagtagactcacttgatgaccaaatgtttacttcagatgtgccttgagggctgtctcagggctcgaaggatatggctgcctttgtgctgatgaaaactacggaagttcagagaagggagcgtggagaggaaaggtcaggtcagagaaggcttcctggaggaggtgacacctaagcaggaggttgtagaagggagtagggtgtggcagctgagaggagctgtgctgagcagaggcttggaagggcagagccacggtggtttatacctttgggtgacaggagagctggcagattggagtggcaagtgtgtttttaggaagtggtaggaagtagagtttgggggaagggtgggtgagggcttggactgaatgttttgcctcagtgggttcttgaactagacccccaaggggcatggaaggaagcggagtttggcaacaggatgtaggtttgattagggtagtgagaggctaggggcaggagagcagccaggaagctcccttgtcttcaggtgtgcagtgatgggggtctgccccagatggggcacgtgtgagaaagaactgatagtcaccatggctagcactttccaagctctttctgcaagccaggaaatatgcttagcatctaatatggaaaactcatgtaatcttcaccaccctggaagataagcaggattatcatcaccagagatcccttaagatcatgtgcctttgtaccaggcagaaccaagatttgaacttatgtgtgtgaggacatagcccatgtttttaagcgttgtcatatgtatgattctaagagacacttcctagtgggtgttggaagttggggatgcagatggaattaagacagtgactacagagcatctggcctggaggattcagaggactgggaagagaagagaaggaaactgaaggggatttggggcagagactatcacaaactccagggactgggtgaatgagtagagctgtcctctggagaaagggactgacgccgaaggtctgcagtgacccagccctgccctgggcaccttcatgcttgtctcactaagaatcctgtgagtggctggcattgtcatttcacagataggaaatataagtgcaggaaactcacatggctgttgagtggtggagccaggattcaaacccagacctgtctctttctgcatggagatctcagttttgcttgaagcaaagtgcttgattttctttggccctgaaaaaataactgcattttattccttctattaaaataagcaaacctgtctccctattttacagctgtagctgtcgttgcttcccttccggtggaggtgaccagtttgtaatgaacttctggatctccagtcagatactatggaggagagagtgatggagggctgaggagaggcctcaggttgttatttggttggggaggcacagagcagaggttcaggtctcagcaggtgtcagaggtgattacagcccttcccatccaccttgcagcaggggctttgtgcctttcatctttaactgggcacctgagatgggaaccaatggggaccatcccagacacatgggtttgtctgtccctgacttctgcctctgagattgtctttgttggtctttgtttaataaacgccccgaccttcctcatgattgctcacaggagtccctgcgtttgtcttcatcccttctcaaacatttactcgacataaggccgcgtgacctctattctgtttgtccagcttatgacctttggacacattcacccagcacaggatatttccaggcctggttagtcagtggcggtttaatgtttttctgacaggaacctctgggcactcaaaattcaagtaccttctaattctaatgaagatcggacctatattaatagattaagtggcagagcttatgtctctctgtgactgtttccagaggacattttactctccatacccagccctaatccagatgcgtggagtttctcacctgaattcttggagcagctgccaaactgaacctgtcttcagcttctgccccttcatcccagctcttccacttctaccagagtgatggggcactcctgcttaaaaaccttcatgagcttcccagtatctaccaaatcaagcatgacctccttgttctgcttggaatccgtggctctgtgggacctggcccaaacctcccctgcagtcttttcccacccctgaccccccatgctctatccccactccattcagaccagatcttgctctttcttgaacacagcctgtgcttttgtttttgtttttgtttttttgagacggtctttctacgttccccaggctggagtgcagtggtgccatctgggctcactgcaacctccacctcctgggttcaagtgattctcctgcctcagcctcccaagtagctgggattacaggtgcgtgctaccgtgcccagctaatttttgtatttttagtagagacagagtttcaccacgttggtcagactggtctcgaactcctgacctcaggtgatccacccaccttggcttcccaaagtgctgggattacaggcgtgagccaccacgcctggcccttgctcctggatttttggcttggaatagccttgtcccatctctgtgataaaatcccagttgttctttgagtgcccacccgtggagaccctcttcataaagctgctcttaaaccctgtcccttttccccatccccagttccacacacctgggagcacctctaatcacctctgctagaagtcgtctcccccagaacatttggattctctctcttggctttttatcatagttcaccttcttttctgtttatatgaatacttgtcttatttcttctaggaacctgtaaaatcctagaagacaaggaacctgtctttttcctttctctttcattccccctcttccctctcttccaccctactccctcttcctttccctctcccttcagtatcatgaacctcggagccccaccctagaactcctgaatcagacactttgagggtggctgggcgcaatggctcacggctgtaatcccagcacttggtgaggccgaggcgggtggatcactcgaggccaggagttcgagaccagcctggccaacatagtgaaaccctgtctctgctaaaaatacaaaaaaaatcagccaggcatggtggcatgtgcctgtaatcccagctacttgggaggctgaggcaggagaatcgcttgaacctgggaggcggaggttgtagtgagctgagattgcgccattgcactccagcctgggtgacagcaagactctgtctcaaaaaaaaaaaaaaaaaaaagaaactgagggcgatgcccagcattctaagtgatcctgattcaaactccaatttgagaacctctgcactagacctctgtagacctctggttctcaaactcagccgcacattagaattacctgggggcctggagcctactccagggattctaattttctgatttaattggtatggggtatggcctgggcaagggagttttgaaagtgcccaggtagttctattatgctgcaaagtgtaaagagcactgccatagagctttgttcttcagggggtggtcagtgggccagcagcatcagctcacctgggagtttgttagactaggactgtcagtctcaccaagccccgctgaagcaaatttgcatttgacaagatctccaggtgattcctatgctctttgaagtttgaaaagcactacccaggagaggaatagaggttatcaacttcaagcctactcttgtccaacagttgagtgaaagagtcacagctgacctctccagccatcctcagcatcatctggctttcagccatcagaggcaacaggtgatttgttttgagcttgctgccccagcaaaatgctcccttaatgaccacaaatgaacacatacattcatttgtctcagccagaaagggagtggagagtgttacagcttatgtctttttaaagctacaattcttagcttcaaaacaaaattacttttatatatatatatacacatatatatctatgatatatatcatatatgatatatgagatatatgatatatctcatatgatatatatatgagagagagacaaagtctcactctgtcaacccaggctggagtgcactggtgtgatcatagctcactataacctcgaactcttggcctcaagtggtcctcctgtttcagccacccaaagcactgcgataacaggaatgagccactgtgcccagcccaaaaattacctttaatttactcaaatgtttgaaaagtataccggacagaattcttagggagcggtaacgttatacctatgaaatgtttagcattcatgtatttcacctgataacagtccattgctgtttttatcagcagttagtctttcaagcagccagagttcagggggaacaatgctcccagtcccactggcttgccagggcagcgctctaatggggagagccctagtgagaatggagctgggcataccctatatcagaaccacttctctattttagaccagtggctgagacacaggggtaggacacaatcaggcaggaaggggctggagaagaattttgagccaaacacacaccaaagcaccaaagactgtgaccagtttatttcattgttacagcaaagtcaggtctatcccctattgacatgagtcttccccatgttcattctggtatgctctatggtgcgggagagaaagaggaggcctgtggccaggcgaggacacgcagggccctgtgaacggccacgggaatttgtgctgtgcacgtgaggccagagctcacgtggcaagtgcgagaaatacaaggaccgttggctgagattgagctacggtggcagcttttgtccactgacagataaggggagaggtcctgtggcccttcagggactgttccagtgaatgatttttggacagtggtcaaatcattttgaaaaaactaaaattggatacctactttgcagcttacaaagaaatagatccctgctttacaagttacacaaaaataggtcccagatggattacagatctgtaatagacaggatctgaaatgacatgtgagagaatatttttgtaatcttagcatgcgggaaggactttcatgtttgtttgacaggaacctctaggcactcacaattcaagtatgaagtgtgaataagcaatacagaagtcatcaaagctagattggactcaaaacagaagtctttctttctttctttctttcttttttttttttttttttgagatggagtctcaccctgtcgcccaggctggagtgcagtggcgccatctcggcactgcaacctccacctccagggttcaagtgattctcctgcctcagcctcccgagtaggtgggactacaggcacccaccaccactcccggctaatttttgtatttttagaagagatggggtttcaccatgttggtcaggctggtctcaatctcctgaactcaggcaattcgcccgcctctgcctcccaaggtgcagggattacaggcgtgagccactgcacccagccaaaacagaagtgtttcatataaaaaacgatactgtgaatcaaaagacagcatacacattaggaggaaatatttgcatccaagtctaatgtagcagatcatgagtcaaaatccttgatctacaagagcctctgcaaattcataagaaaagtcaaccaaatagaataaaaggtaaaagatataaacaatttagaaatgaagaactaaaaattatgaaaatatgttctggccaggtgtggtggctcacgcctgttatcccagcactttgggaggccaaggtgggtggatcacgaggtcaggagttcaagaccagcctggccaacatggtgaaaccccatctctacgaaaaatacaaaaaaaattagccgggcatgtggtggtgtgcacctgtaatcccagctactggggaggctaagttaggagaattgcttgaacccaggagacagagatcacgccactgcactccagcctgggtgacagagcaagactccgtctccaaaaaaaaaatttttttctttttaattagccaggcatggtggcacacacctatagtcccaactacttgggggctgaggtgggaggatcacttgagcctgggaggtcaagacttaagtgagccaagatcccaccactgcactccagcctgggagacagtgatatactgtctcaaaaaacaacaacaggccagtcgtggtggctcacactgtcatcccagcactttgggaggctgaggtgggtggatcacctgaggtcaggagtttgagaccaacctggccaacgtggtgaaacctcatctctactaaaaataaaaaaattagctgggagtgatggcaggcgcctgtaatcccagctactcaggaggctgaggcaggagattcgcttgaacctgggaggcagaggttgccaagatcgcgccactgcactccagcctaggcgacagagcgagactgtctcaaaaaacacaaaacaaaacagaaaagcaagaacaacaaaaaagtggatgtctgggccatccagcctcttactcataagcctgcttccttagaagccgcctccctacatctactcatatccacagaatgtgctcctcttggcatcctggagtagccaaagccattgctatcagtaaaaaaatttttttttaattcccagctgccaccatctcctctcatctccattcacaacgtggtaagaatattatttttgtatctgaccaaaaccagtttctgagttttcattttcttaattggccaccaataaataaaggagggactcacctgcccttgaacgtgctctgctgtgtgctctggatctcataggggccagcctttctcagggagcctggagggggccagggatcccttattcttcccagctcagtgactttttcccattttggaggcccttgtcagtcagatcacctgaagggccactcttttctgtcctgtagaatgactcctgtgtctctctggtcttagagggcaacttgtgaagaactgccaaccttcctttggtcttcgctggatagcagcggtgtttgtaaagataggactggtctttgagcagtacagtgaaggggttattgggcctggattctactcagagggacctccttagtgaggtttatgatatttatgttatacagcaatgtagaaatgaccttctaaaggccaggagcggtagctcatgcctgtaatccgagcactttgggaggccgaggcaggtggatcacgaggtcaggagatcgagactatcctggctaacacggtgaaaccctgtctctactaaaaatacaaaaaaattagccggacgtggtgtccggcgcctgtagtcccagctactcgggaggctgaggcaggagaatggcgtgaacccggtaggcggagcttgcagtgagccgagatcatgccactgtactccggcctggaagacagagtgagactgcgtctcaaaagaaaaaaaaaagggggaaatgacattgtaaccaaaattggggttgggaggaataaggtggttttataggatatgttctttgattgtcttgtatgtaatacctgggagttcaaagacttgacatttaaaagaagatagccccataaattaagtatcgcacttaaaggctgccagattttaaagaaattctttcatatgttcatctaatagtttgatgctgctatttgggttttttgttttaacatttaaatcttagatccatttgggatttgtccgtttctgggtccagcttgaatttttccatttgaattgaatttttccagttttccgtaactagttcttccagcatcatttattgtatgttgtgtctcttctccatggatttaagaggccaaccgtattgtatgctaaattttcatagtcattatacagattatcttttctcttctcttggcctgtctatttctgttccacttgtattaaattctgaacttacatatctattgaatctatttctggagtttttattttgtttatttggtctgattgtctattaatgttttaattattgagatttcataatgtttttgtttttgtttttgagacggagtctcgctctgttgcccaggctggaatgcagtggcacaatctcggtacactgcaacctctgcctcctgggttcaagcaattctcctgcctcagcctcccaagtaggtgggattacaggcgcccgccaccacacccagctaatttttgtatggggtttcaccatgttggccagggtagtctagaactcctgacctcaggtgattcactcgcctcggcctcccaaagttttgggattacaggcgtgagccactgcacccggccgagatttcataatgttttaacatctgacagagatagtccctctcccctccaattttagtcagtaatctttcttttttttttttttgagatagaatctcagtctgtcacccaggctggagtgcagtggcacgatctctgctcactgcaacctccacctcctgggttcaacgattcaacgattctcctgccttagcctcccaactagctgggattacaggcatgtaccaccatgcccagctcatttttgtatttttagtagagatggggtttcaccatgttggccaggctggtcttgaactcctgagcttgcgatccgcccacctctgcctcccaaagtgctgagattacaggtgtgagccactgctcttggcctctttttttttttttttttttttttttcagagacagagtctcactctgtcacccaggctggaatgcagtagcatgatcatagtttactataatctcaaactcctggcctcaagcaatcctcccacctcaggttcctgagtagctgggactacaggcaagtgccaacacacccggctaattttgtttttttttgtagagatgaggtcttggctgtgttgctcaggctggtcttgaactcctggcctcatgcagtcctctcacctcagccatccaaagtgctgggattgcaagcaataatcttatcttttttagtgtttatttttgcaaacctctacttagctgcatgctttaccagttttaaatgtgaattctttgaactcccaggttattacagatgaggcaatcaacgaacatatcctataaaccaccttatttctcccaaccccagttttggttagaatgtcatttctacactgccgcataacattcacaagctctttaatcaccccagttgccatggtagttttagtcttcattctaaagttaaatttattaggtgttcacccctctagcagtccattaatttgtgtatgttcaaagctgtttgcctataggtttatacttgaaggacagttttgtcgaatatagagaaatcttttttttttcctgagatagagtcgcccaggctggagtgcagtggcgcgatctcagctcaccacgacctccacctcctgggttcaagcagttctcctgcctcagcctccggagtagttgggattacagtcacgtgccaccacacccagcctgaatatagagaaatctgaaaccagttgattttctttccccttgtaagtgatttgatccttttgctgttgtccactggtcttactgttagccaccctgggttagtttttgttggcccatggtgtaactttcacatgttcttatatccttacaggttttatctttaagtattagttctttttttttttgagacggagtctcactgtgtcgcccaggctggagtgcagtggtgtgatctcagctcactgtaacctccgcctcccgggttcaagcgattctcctgcctcagcctcctgggtagctgggactacaggcatctgtcaccacacccagccaatttttgtatttttttagtagagacggggtttcaccatattggccaggctgatcgtgaactgctgaccttgtgatccgcctgcctcagccccccaaagtcctgggattacaggcgtgagccaccacgcctggcctttaagtactagttctattgctttgtttttttgagaactccagttatgtttactgattctccttttgcctaacttctgtttctatctttttgtttaagatagggtctcactctgtcacccgggctggagtccagtggtgcaaatatggctcactgcagcctctgcctcctggcctcaagcaatcgtcctgccttggcctcttaagtagctgggtctacaagtgtgtacagccacacctggctaatttttgtattttttgtagagatggggtgttgccatgtttcctaagttgtcccaaactgctgggctcaagcaatccacctgtcttggcctcccaaagtgctgggattacagacctgagccaacgcgcctggccctctgtcattctttttaatccttttaacctattcctttgtttccatttcctgtcattgctttcttattttggtcctctttttcccattcttggaatggtgctttccaagatgcctattcccattgcgctccttttcctgttgtcttcatttctctggctgattttccctcctttcctgagttcttctagtgtacatttaatctcttcctgttgtctcaccatcccttcttcaagctcttctctgtggtattcctttataaaggcagttgcctcatttaattatttttatggatggaaatgatcacttttctcagtaatagtaattccttgggccgggctccagcctataatcccaacactttgggaggccgaggcagttggatcatttgaggtcaggagttcgagaccagcctggccaacatggcgacaccccatctctattaaaaatacaaaaacaatgagccgggggtggtggtgtgcacctgtaattccagcttgtcaggaggctgaggcaggagaatcgcttgaacctgggaggcagaggttgcagtgagccaagatagtgccactgcactccagcctgggtgacagagtgagacttcatctcaaaaaaataaataaataaataccttggattaatgtgcgtgggtcaaaggctctttccttctctgctttccagaaacagcttcctgcgtacatggctgccctgtgtgattccagttgcagcctcacctcctttgcctctctgaaccaaagaagccagccctgcttaccccagttcccaaacacaggaagtgattttctgcctgagctttctgagttctgttccctcccaccccagggctctccatgcttattcattgcatttccttcctcattgcttttacccagtctgctgttttgggaagccctgacatgtattttggtgcctacatattttatcttctgatctcactgaaaataaaattggattttacttgttttccttgttgcttccgagctcattggagagctaaccagttctgattttaaaacagcaaaaacagccttattagctaatgttacctattcaattactaaaatcacccaaaaaaatgtttttggtcatgttagtttgctaaaaattaatcagggtcttggcctgcaggttcttctagaagagagatgctggcagggctctgtgctcaaaacttgccaaaaaactgtcttccggccagacatggcagctcacgcctataatcccagcactctaggaggcggaagtgggcaaatcacctgaggttggaagttcgagacctgcctgaccaacatggagaaaccctgtctctactaaaaatacaaaattagccagccatggtggcacatgcctgtaatcccagttaattgggaggctgaagcaggagaattgcttgaacccggggaacagaggttgcggggagccaggatcgcgccactgcactccagcctgggcaacaagagcgaaactctgtctcaaaaaagaaaaaaaaaaaaactgtcttccatggccaggcgcagtggctcacgcctctaatcccagcactttgggaggccaaggcgggcggctcacttgaggtcaggagtttgagaccagcctggccaacgtggtgaaaccctatctctactaaaaatacaaaaattagccaggcgtgttggcgtgcgcctgtagtaccagctactcaggaggctgaggcaggagaattgcttgaacctgggaggcggagcttgccctgagccaggatcgcgccactgcactccagcctgggtgacagagtgagactccaaaaaaaaaaagactgtcttgcaggaagttgaggaaacacagaattcctggttctgccgagtcagagtataccttgtgccccttgtgcctgtatctgtcccctagtgatatgaggggtggggctggagggcaattctgtgaacccacagattaccagcagcatgtgtcagtgtaagcatggagtttaattatatgcctgttttcaactttaaaggtgatcttatggccaggcatggtggcttatgcctatcatcccagcactttgggaggccaaggcaggaggatcactcaagcccaggactttgagactagcctgggcaacatagcaaaaccccatctctacaaaaatacaaaaaaattagctgggtgtggtggcatacacctgtgtaatcccagctacctgcaaggctaaggtgggagcgtcacctgagcccaggaagttgaggctacagtgagctgcgatctcgctactgtactaccgcctcggtgacagactaagaccttgtctcaaaaaaataaaaaataaaaataaatgtgatcttaaattgactgaaggcaagagtggagcccaggtcctgcctgagaggggcatgtccaattttatcatgttcatatgtaagagtttatattaacttacagaaaattaattgagcatctaaccttaaataaagttttttagctttaataatagaaatgtcactaggagttcgagcgcgatagctcacacctgtaatcccagcactataagaggcccaggcgggcggatcacctgaggtcaggagtttgagaccagcctggccaacatagtgaaaccccatctctactaaaaatacaaaaattagctgggcgtggtggtgtgcgcctgtagtcccagctactctggaggctgaggcaggagaatctcttgaactcgggaggctgaggttgcagtgagcctagatctcgccactgcagtccaggctgggtgaccaagtgagactctgtcttaaaaaatagaaaaaagtgcagctttttttaggattgaggtcaagagggaaatttcctcctcaggctcatcaagaggacattgtgtggtataaacaatgtcatcaacaacttcctggcagcattaatgttcccaacagccattaattttttttttttttttcgagacagagtcttggctctgttgcccaggccggagtgcagtggcgtgatcttggctcaccaaagcgtccacctcctgggttctagtgattctcctgcctcagcctcccaagtagctgggattacaggtgcctaccaccatgcccagctaatttttttgtatttttattagagacggggtttcaccatgttggtcaggctggtctcaaactcctgatctcagataatctacccaccttggcctcccaaagtgctaggattacaggcgtgagccaccatgcccggtgtcagtcattaatttctaatgacacttcttagagtgtcagccagggctatgaagccaacacactattcagtaaacacagttctgccgggggtcagaacagtgtgatccaggctcagctctctgctgctttggcctcatcctcgggtagattttacagtccctcatctaaggaaggggctatgttcttctagcagtcctccctaatgatttcttttactcaaatatttgggcactggaaggtttaacaagttcctggaagacatattaccaattaaagatctattcatggctgggcgcggtggctcacgcctgtaatcccagcactttgggaggccgaggcgggcggatcacaaggtcaggagatcgagaccatcctggctaacatggtgaaaccccgtctctctaaaaatacaaaaaattagccgggtgtggtggtgggcgcctgtagtcccagctactcgggaggctgaggcaagagaatggcgtgaactggggaggcggagcttgcagtgagccgagatcgcgccattgcactccagcctgggccacacagcgagactccgtctcaaaaaaaaaaaaaaaatctattcataagctcccactgcagacaaatttgagggctcttttaacaatccagttaacttgcttctagtcattggtatacacacctagggtccttattgcacgggctctgtcatctttcctgtgtctaaatacaaagtaatgcggtcataaacaccagatacatgttaatacaagaaattattatataagctccttttgaaaggagactgagctttagggaaatgtctatggtaccaataaaaaaactcattcatgcactcattacattgaatcaagcaccaggcattatggtgagtgtgggggtaattgggtaggtaccctgtttatgtcctttaaaattcccacctgacctcattttcagatgaagacacaggtagtggggacatggaacccaaatctttaaggctttgaaattctgggtgattgccacaaagattatgaggcctgacaaccagtcagaatgaaataagcctgggttggtttttttttttttttttttccatcagcttttaggttcaggggtacatgtgcaggatgtgcaggtttgctacaaaggtaaatgcgtgccatggtggtttactgcacaggtcatcccaccacctaggtattaagcccagcatccattagctattcttcctgatgctctccctccccctcccccacaggccccagggtgtgttatttccctccatgtgctcatgtgttctcttcattcagctcctgcttataagagaaaagatgcagtgtttggttttctgttcctatgttagtttgctgaggataatggcttccaattccattcatgtccctgcaaaagatatgatctcattcttttttttggctgcatagtataccatggtgtatatgtactacattttcttcatccaatctatcattgatgggcatttgggttgattctatgtctttgctattgtgaatagtgcagcattgaacatgtgtgtgcatgtatctttataatagaatgatttatattcctttgggtatattaaacctgattattaaaggctttgaggattttctagcctctttgtgttcactggaagtttaatttttataaatttcccccttcgttttcttttgtcatcatgacagggagttgagtagacattgtatgtttttcttcattgtttcagattttgagatacagagtgaaaatggggagaactgtaatcaagacatgtttgagaatgaatcacgtaagatattctcggaaatgcctgaaggtgaaagtgctcagcactccgatggggaaagtgactttgagagagatgctggcatccagaggctccagggacacagcccaggtgaggaccacggggaggtggtttctcaggacagggaagttggccagctcataggcctgcagggcacctacctaggggagaagccctacgaatgtccccagtgtgggaagaccttcagccggaaatcccacctcatcacacacgagaggacccacacaggagagaaatactacaaatgtgatgaatgtggaaaaagctttagtgatggttcaaattttagtagacaccaaaccactcacaccggggagaagccctacaaatgcagagactgtgggaagagctttagccggagtgccaacctcataacccaccagaggatccacacgggggaaaagcccttccagtgtgccgagtgtggcaagagcttcagcaggagtcccaacctcattgcacatcagcgcacccacacaggagagaaaccctactcgtgccccgagtgtggaaagagctttggcaaccgatccagccttaacacgcatcaggggatccacactggagaaaagccctacgaatgtaaagaatgcggcgaaagctttagttacaactccaatctaatcagacaccagagaatccacacaggagagaaaccctacaaatgtaccgactgtgggcagaggttcagccagagttcagccctcatcacccaccggagaacccacacaggagagaaaccctaccagtgcagcgagtgtgggaaaagcttcagccgcagctctaacctggccacacaccggagaacccacatggtggagaagccctataagtgtggggtgtgtgggaagagcttcagccagagctccagtctgattgcacaccagggcatgcacacaggggagaaaccctacgagtgcctgacatgtggggagagcttcagctggagctccaacctcctcaagcaccagaggatccacacgggagagaaaccctacaaatgcagcgagtgtgggaaatgcttcagccagcgctcccagctcgtagtgcaccagcggacccacacgggcgagaagccctacaaatgcctcatgtgcggcaagagcttcagccggggctccattctggtcatgcaccagagagcccatttgggagacaagccctacaggtgccctgagtgtgggaaaggctttagctggaactcagtcctcattatacatcagcgaatccacactggggagaagccctacaaatgccccgagtgtggcaaaggcttcagcaacagctctaactttatcacacatcagagaactcacatgaaagagaaactttattgaagtggcaaagagtgaaagtgagggactggcctggagtgggagttgccacactgccccaacagtgattccctttcaaagagctgtgcttcctaaacattctggggggttttgccagagtcttccccttgctcatcctcatttccaggacactgtcattttagtggtctgagtcaagtcccgtatacattcaagaacagggcataggcgtggaaggtctggaaagttgggtctttttcccttacattgggtgacttgattggccccctctcatgattcctctgtgcctcagtttcctctttggtaaaatggggggaaatgtttctccatgtggaatggaagacagcatggcccacaacgtgggccgagtcctcagagaaatactggaaatcattggtgtggttctggttgttttgttgttttgctgccacgttgttgggctaaggtgccttcaccccaagctgttagtgttccagggcaccccaagctgtcagttagaatctgctcttctggctttggtgtcttgggctttgatttcaggtcaagatggaggggcttctccagttctgagtcacccacgtgaaggtaaagaccctttctatttccagaaagtgtcaggagcacagaaacttgaggaagtacagcctggagccagtgtcccagtgtcctttccattggtaagagttggacagggccttcaggaaaggggtaaaccgaggacatttcagtgcttgcttttgtctctgcctactgtcctgtggtagatcagctaccaggggaacacatttgttctcgtggggttttgtcctggagagtgtagtgaagtccgagagccctagctgccaacccatggtggatggtaacttctgtctcatcaagagtaaaacagtcctgcacacagcagggtgggtttgtgcctttggcccaacaggtacatagccccataatttctgaattattctatgcacttgtttccctcttcttttattttttatttgatatatgccgagctagaatcctgtcgggtagcttttgtatactaagaacattattattattattatttttgagacggagtctcactctgtcacccaggctggagtgcagtggtgccatctcagctcactgcaagctccgcctcccgggttcacgccattctcctgcctcagcctcccgagtagctgggactacaggtgcccaccaccacacccagctaatttctttttttgtatttttagtagagacggggtttcaccgcgttagccaggatggtttcgatctcctgtcctcgtgatctgcccgccttggcctcccgaagtgctgggattacaggcgtgagccagcgcacccggccaagaacattatttttaaagaagtgttaactttgaggacatatctgttccctggagatatttgggcttgaatcaggagtttgtcctacaggtgtcgcccttgatctcaggatgctaccagggctttgttctcgggatcctcgcacctggagagtgaagacgggcatgacggcaggtgaaggggtttgctgtgaaggaagaggagataaggcatttccaggaaatgggaaactgcctcctcctacacatggggcctgtgctcagaatgggcttagttcttataggatggatgctcagtattccttaataaagtagagttccattcttttcctgagtctgtcttttactgtgttaaaaacctgaactaggctgggcgtggtggctcacacctgta

SEQ ID NO: 1605 - DNA, 2265 bp, Homo sapiens
cgggactacttgttgatatttgaggagggaagtgtcttacctgagagcctggctggagaagactgaggtccaaggcttgaagcctaagtgattgccccaggactgtggatgatggctgcagacatcccgagagtgaccactccgctgagctccttggtccaggtgcctcaagaggaagatagacaggaggaggaggtcaccaccatgatcctggaggatgactcctgggtgcaagaagctgtgctgcaggaggatggccctgagtctgagccctttccccagagtgctggcaagggcggcccccaggaggaggtgaccaggggaccacagggtgcactcggccgcctccgagagctctgccggcgctggctgagaccagaggtacacaccaaggagcagatgttaaccatgctgccaaaggaaattcaggcttggctgcaagagcatcggcctgaaagcagtgaggaggcagcggccctggtggaagacttgacccagacccttcaggacagtgattttgagatacagagtgaaaatggggagaactgtaatcaagacatgtttgagaatgaatcacgtaagatattctcggaaatgcctgaaggtgaaagtgctcagcactccgatggggaaagtgactttgagagagatgctggcatccagaggctccagggacacagcccaggtgaggaccacggggaggtggtttctcaggacagggaagttggccagctcataggcctgcagggcacctacctaggggagaagccctacgaatgtccccagtgtgggaagaccttcagccggaaatcccacctcatcacacacgagaggacccacacaggagagaaatactacaaatgtgatgaatgtggaaaaagctttagtgatggttcaaattttagtagacaccaaaccactcacaccggggagaagccctacaaatgcagagactgtgggaagagctttagccggagtgccaacctcataacccaccagaggatccacacgggggaaaagcccttccagtgtgccgagtgtggcaagagcttcagcaggagtcccaacctcattgcacatcagcgcacccacacaggagagaaaccctactcgtgccccgagtgtggaaagagctttggcaaccgatccagccttaacacgcatcaggggatccacactggagaaaagccctacgaatgtaaagaatgcggcgaaagctttagttacaactccaatctaatcagacaccagagaatccacacaggagagaaaccctacaaatgtaccgactgtgggcagaggttcagccagagttcagccctcatcacccaccggagaacccacacaggagagaaaccctaccagtgcagcgagtgtgggaaaagcttcagccgcagctctaacctggccacacaccggagaacccacatggtggagaagccctataagtgtggggtgtgtgggaagagcttcagccagagctccagtctgattgcacaccagggcatgcacacaggggagaaaccctacgagtgcctgacatgtggggagagcttcagctggagctccaacctcctcaagcaccagaggatccacacgggagagaaaccctacaaatgcagcgagtgtgggaaatgcttcagccagcgctcccagctcgtagtgcaccagcggacccacacgggcgagaagccctacaaatgcctcatgtgcggcaagagcttcagccggggctccattctggtcatgcaccagagagcccatttgggagacaagccctacaggtgccctgagtgtgggaaaggctttagctggaactcagtcctcattatacatcagcgaatccacactggggagaagccctacaaatgccccgagtgtggcaaaggcttcagcaacagctctaactttatcacacatcagagaactcacatgaaagagaaactttattgaaaagtgtcaggagcacagaaacttgaggaagtacagcctggagccagtgtcccagtgtcctttccattggtgtcgcccttgatctcaggatgctaccagggctttgttctcgggatcctcgcacctggagagtgaagacgggcatgacggcaggtgaaggggtttgctgtgaaggaagaggagataaggcatttccaggaaatgggaaactgcctcctcctacacatggggcctgtgctcagaatgggcttagttcttataggatggatgctcagtattccttaataaagtagagttccattcttttcctga

SEQ ID NO: 1606 - DNA, 1845 bp, Homo sapiens
atgatggctgcagacatcccgagagtgaccactccgctgagctccttggtccaggtgcctcaagaggaagatagacaggaggaggaggtcaccaccatgatcctggaggatgactcctgggtgcaagaagctgtgctgcaggaggatggccctgagtctgagccctttccccagagtgctggcaagggcggcccccaggaggaggtgaccaggggaccacagggtgcactcggccgcctccgagagctctgccggcgctggctgagaccagaggtacacaccaaggagcagatgttaaccatgctgccaaaggaaattcaggcttggctgcaagagcatcggcctgaaagcagtgaggaggcagcggccctggtggaagacttgacccagacccttcaggacagtgattttgagatacagagtgaaaatggggagaactgtaatcaagacatgtttgagaatgaatcacgtaagatattctcggaaatgcctgaaggtgaaagtgctcagcactccgatggggaaagtgactttgagagagatgctggcatccagaggctccagggacacagcccaggtgaggaccacggggaggtggtttctcaggacagggaagttggccagctcataggcctgcagggcacctacctaggggagaagccctacgaatgtccccagtgtgggaagaccttcagccggaaatcccacctcatcacacacgagaggacccacacaggagagaaatactacaaatgtgatgaatgtggaaaaagctttagtgatggttcaaattttagtagacaccaaaccactcacaccggggagaagccctacaaatgcagagactgtgggaagagctttagccggagtgccaacctcataacccaccagaggatccacacgggggaaaagcccttccagtgtgccgagtgtggcaagagcttcagcaggagtcccaacctcattgcacatcagcgcacccacacaggagagaaaccctactcgtgccccgagtgtggaaagagctttggcaaccgatccagccttaacacgcatcaggggatccacactggagaaaagccctacgaatgtaaagaatgcggcgaaagctttagttacaactccaatctaatcagacaccagagaatccacacaggagagaaaccctacaaatgtaccgactgtgggcagaggttcagccagagttcagccctcatcacccaccggagaacccacacaggagagaaaccctaccagtgcagcgagtgtgggaaaagcttcagccgcagctctaacctggccacacaccggagaacccacatggtggagaagccctataagtgtggggtgtgtgggaagagcttcagccagagctccagtctgattgcacaccagggcatgcacacaggggagaaaccctacgagtgcctgacatgtggggagagcttcagctggagctccaacctcctcaagcaccagaggatccacacgggagagaaaccctacaaatgcagcgagtgtgggaaatgcttcagccagcgctcccagctcgtagtgcaccagcggacccacacgggcgagaagccctacaaatgcctcatgtgcggcaagagcttcagccggggctccattctggtcatgcaccagagagcccatttgggagacaagccctacaggtgccctgagtgtgggaaaggctttagctggaactcagtcctcattatacatcagcgaatccacactggggagaagccctacaaatgccccgagtgtggcaaaggcttcagcaacagctctaactttatcacacatcagagaactcacatgaaagagaaactttattga

SEQ ID NO: 1607 - DNA, 26642 bp, Mus musculus
  misc_feature (1)...(363): n = a, t, c, or g
nnnnnnnnnnnnnnnnnnnnnnnnnnnnnnnnnnnnnnnnnnnnnnnnnnnnnnnnnnnnnnnnnnnnnnnnnnnnnnnnnnnnnnnnnnnnnnnnnnnnnnnnnnnnnnnnnnnnnnnnnnnnnnnnnnnnnnnnnnnnnnnnnnnnnnnnnnnnnnnnnnnnnnnnnnnnnnnnnnnnnnnnnnnnnnnnnnnnnnnnnnnnnnnnnnnnnnnnnnnnnnnnnnnnnnnnnnnnnnnnnnnnnnnnnnnnnnnnnnnnnnnnnnnnnnnnnnnnnnnnnnnnnnnnnnnnnnnnnnnnnnnnnnnnnnnnnnnnnnnnnnnnnnnnnnnnnnnnnnnnnnnnnnnnnnnnnnnnnnnnnnncctcatgaatgctgagactaaaggtgtgcatcacccctgcccaatttcaaaatagtgacccaagggaagaccagattacaaggtgctgcactacaaagtgagaaaatgttaacggttaccctttaaaaactttgcttagagggaaaaaaaaaaccccacaatcataaccaaagcaatggaccaggaactattttcctgcctgttttgtcttttcaaatttctgtcatcttctgctcctagagaggaacggctacagtaagatggtctgaagacctggtagttttttttttttttttttttttaagatttatttatttattatatgtaagtacatgtaagtaagtacattgtagctgtcctcagatactccagaagagggcatcagatttcgttacggatggttgtgagccaccatgtggttgctgggatttgaactcgggacctttggaaaagcagtcggtgctcttaaccactgagccatctcgccagcccagacctggtagtttaagcctgcaatctcagctgtttggggaggggaagcaggagggttgcaagctcaaagcctgagctacagaatgagttcaaagccagtgtgaataacttagcagggctcacagtcttgacattcagagatggggaagattatggggctgagctcagaccacaatataaaatgaagaaggaacacagaggagagaagccaagaactgtcggggtttatgaaatcattacaagacacaagaatttattatttttccagaattgttacccaagcatttggcatccatcgccacctacatgtcagtgtccacctggacagaaatctcaaacttagtccagcgtagaacatcttacccacaggagcgctcctcatgggactatgtcaccatcatccaactagaaacacagcagtcatctcagcctccttagtcttccttacagcagcaactccatcctctaaccaaagcatctcccactgagcacgccctcctgcccccctctctctctctccctttatcgctgctgcagtctacagcagatgcacctctcagcagggatcctggagcagccatctagtgccttatcccctccagtctttctacactccaataatgcttcaggtcactaactcctttatgtaaaaacaattaaggctcagcaagatggctcagaggggtaaaggcaacttgctgccaaacttgatgacctggggtcaatctccagtactgatgtggtaggagagactcaactaccaagagttatcctctgacctctacatgtgtgttgtggtacacccacaaacacagagagagagagagagagagagagagagagagacagacagacagacagacagacagacagacagagacacacacagagagaaatgtaacgtttagagaagaatccatccatattctttagcacagaacagaaggcacattaattataacctgggcatcctgccctgtcttcctcacatccaactctatagctgcttcctcctctaacacccaaggttgttaagtcttgtgtccccttctgtatcttgctccttgttctttggtcacacagtgaccaaagtcactgagtgttgtgcaaacctcttcttcttgactcctgtatctctctggagctctacttaggctccagtacctgcaagggattaatgccctcacatgacaggccccagacagaacccatcctctttccctctcaccaaggttgggaatgctcacagctccctgatttctgtgtaactcctgtcaagcagactgaaacaccgacattacatcttgctctttatgcttgcctatgtcccattctgtgtcatgacaattcagccaccaagttctgttaactctcccttggttatatttctctaggatacacattttcatttctatggccagaatcataaaattaccactagcccaggacctgacccatccctcacccctctttccagtatcaaagggagacaaactgtttttattaaagatgtactgtatttaaaaaaacctagaatcaaaactttgaacaaagtggggtgtgatggtatacacctttaatcccagcacttgggaggcagaggcaggtggatttctgagttcaaggccagcctggtctacaaagtgagttccaggacagccaggtctacacagagaaatcctgtctcgaaaaaaccaaccaaccaaataaataaataaataaataaataaataaataaataaatacaaggtctctggataaactccttccaaatagaaatgagaagccatctggtgaagctcagtgtgagggtgaggtggcacgagatggaactgggcaattggaaagagttaggtattgtagagccacaggagagcaggactgtggtgacttctgtggccctgtgatgttctcactcaagagtgacttacatcaggattccattcttaaataagcacactttattagcaactataactctgtatacattgtgtttgcttttaatatttaactttttgttttccaaaaagagttcctgaaacatacaacaagcagaaattgtcattgctgaaggatgcttagcatgctcatgtttctgagtgtttactaggcgtgataaatttgacttttcttgttttctttcagttcactctgtctgatgctcctgccccggtctcctaaatgcagggattataggtgtgcaccgccacacctaactgtgtacagtagatcgtaagatgggaaatcccagagtcagggaccttaggtggctgacctatacacagtgacatgcccaggaagtgttaaatctggcatttgaatccacctgtttgaccccagagtttgtcaaagggtaatagtacagcgctcttgcatgacttaaagagatgctcattttcccaagagaaccaagaggttctagtggccaaatgtcagtatgaataaatctgctgagatgcgctgtgcagcgtccgtcgaccttacaggaggacagagcaatccttttcctttttgattcatcgctcctttcagacttgatcctctcaccacagatctctttccttccacttcctcattcaaaatggggtcagttccccctcagaacaaaagaggaacatgaggcgaagaccctttgcagagggaaaatccacagctgggcgtaggccgagggagctttcgctgggagaagcaggtgagttcggatgaagggaagcaactgagagaggcaaggcagatcctcagacggggcgggttggggggggggcgactcggagagggagttttcggggagtcatcagagctggccaggaagaactaggcatgaacatgagtcccagggactccgagggacacatttctgcttaggtcccacagtattaacacggtccactaaaagcagatacgctcagcaggatgagcggccacagaggagagcctatcagtactcggtttagtcattaccttttaatacacatgatttatataagcctgtatgtgtataagacttaagttataaatggctaattacattacagaaggactacagaaggcagagagagggagggaggggagggcaagggtggggaggggagggaaaggaagatgctctttacctataaggtttatctagtatctttctaattggtccttttagtggcaattctgttaacattcaaatacaccatggagagggaagaacagaaaacccccagatgcctggaactggggaagctgtcttaaccctgacctctcttgggatgctcttctcatctataaactaatgattactttagatcacttctgaatgaccatggttaagtcctggtctaactctatccagccccgtagacctggtagacaagatggacctgtgcgtaactcttctagggctgattccacatggaatttacctacttttatttagagatgaggtctcactgtgtccctctggatgagctggaactcaccacacacaccagggtggcctcagactcagagatttacttgccagtgcttctcaaatgttggggtaaaaagcgtaagccaccacccacagaccccatgaattcatatcaattgttatttgaactaacttgaccttcctactcccctcagctcacatcctcaaccgtccctgccttcccctccagacttcctcccccatttccacgcttttgctcaagaagtctcatgatctcgttcaaggaagctctcccaggttggctgacctcatagctggcaacaaaggcaactactgctaggggtgaacacaaggctacagtgcactcatcctgcacccaaactcagaattgcaccaaagtgtgtgtgtgtgtgtgtgtgtgtgtgtgtgtgtgtgtgtgtgtgtgtgtgtgtgtgtctgtgtctgtgtctgtgtctgtgtctgtgtgtctgtgtgtctctgtgtgtgtctgtgtctgtgtttgctttcactgtgtatgcatatgtggagaccagagacgaatgaggagatcatagacatacactgtcacacccagcctttctgtggatgctggggatccaaactcaggtccccagatccatgcagcaagtcctttgcccactaggctgtctcccgagctctgcacctaggctctttataggaccagcagtgtggcctcactgtcctctatttccaatctgtgtttattacaactccgctgacatattggggttgatttcttggagggatgcttttattctcttggtgaaatatttttctgtgcactgatggcttgtgaaattttcttctctgttgcctcagttcaagccagacgaacaaggagctgagattaagcttagtaagtaaagcccaggacctggaggatctggaaactgggtgaaagagttgtcctctgttggctaggttaggttcagggcagccaggatggagtcagaggggtggctgacaacacccaggggccactgtcagctctgtgactttccctccagaaaaaggggccagttctgtgcaaacatgttcttgtccaggagtttggtttcttctctctgagcacctggcacagtggcaccaatgtgagcagtcacttggcagggcagagaaaagcaagctagcagtccccaggctcaggtgacagagccaggcccaggagacagggatattgactggggctttaacagcactattgatgccaatctcgggcaaaaacctgatatttccacttggaataacaagaaacagccaagaggattggagagaggtcagtggacaaggagagccctctgcaggtcgtgctgggtgattccagaacagaagagggcagcccctgctggacagggtctcctgagatgatggtgatggtgacggtgatggtaatagtgatggtgacagggacaatgacagtagtagtggctaggagaaggaaaaagaagaaagagaaaaacacaatgtcaggctttaaataaataatcctcatgaagtagatactatttattgtggttttgatatgaaacacccctcccccaagggctcgggtattggagatttgagccccagcgtgtggtgctattgagaggtgactttgttgatggcgactttgtttgatgaggagataagaggtggactgtaaggaggtgaaagctgtctgaggaagtaggtcaccagtggtgtgctctcaaaggtgggtctcaaccttcccaatgctgtgacgcttcatttaacacagttccttatgttgtggtggcccccccaatcataaaattagttttgttgctgcttcataactgtaattttactactgttataaatcataatgtaaatatttttggagcttagaggcttgccaaaggggtcacgacccacaggttgagaaccactgctctagaaggaagtcacctcctcttctctccttgtcattctcttttcttcctctcccttacactccccttcttctcttctctctccctactcctcacctctccactctccatgaaatctgatttcccctgctatctaccacaatgccggatctcatattcccaagaagaatggagacaaacaaccctggactggattcctcctcttttaagtgtgacttgggtgttctgttacagcaatgaaaagctagcaatataagatggctagtctcatctcttagatttaaaaaactaacattttccaaacatagtggctcatgtctgtagacacagagccagggaagcagaggcagaaggatccactgcaggtccaaggctggcctggactatgtaacaagagagagagagagagagagagagagagtagagagagagagaggagagattgaaggaaagaaagattgaagaaaagaaagatgaaagaaagaaagaaagaaagaaagattgaaggaaagaaagagagatttaaagaaagaaaaaagaaagatgaaagaaagaaaagggaagaaagattgaaggaaagaaaagaacggaaggaaggaaagaaggaaggaaggaaggagtgcagggggaggagggaagaaaagagtggagggggaggagggagaaaagaaagaaaaggagactatatgaagctatttgctcaaagccatgcatcttctatcagagagtagaatttgaactcaagtcattgcctctgaagcttgtattaccccacacacctgtcatagctcgtgagcacatttcagaaacttctagtcttctattgtgctgtttcttcctgttctttctagttatgtattcttgcagtgttaaggcttaggggattggatataaaatatcttgtgcataacaatattggcaatagtaataacaccagcttaaatttattttttatagctttagtaatttaatttatgtatatgagttcatggtagctgtcttcagacacaccagaagagggcatcagatcctattacagatggttgtgagccaccatgtggttgctgggaattgaactcaggactactggaagaacagccagtgctcttaactgctgcaaaatggtacagttactctggaagacagtttggcagtcacctgaaaaactaaacatactctttccatatgatattgcaaccatactccttggtatttaccgcacccccaaaagctgaaaacttgtctaaataaaaaccctgcacacagatgtttgtagcaactttatttggaatcggcaaaaactggaaatgaaatgactttcagtggctcaatggacaaatgaattgtggtactttcctggccgtggaccatcattcagtaccaaaatgagatgagctgtggagctaaaaaagacatgaagcaaccttaaatgcacaagtggaagaagccaatccaaggagctgcatactgtataattccaaccccatggcatcctggaaaaggcagaaccatggaaacaggtttttaaaaaatcagagattgccaaaggctaaggggagagtggatggctgggggcagcagagaggaaagcaccccacaaccatcatggcggatacacatcctcgtggccgttctgggtttacagcaagagaaaccacaccaagagaaagtcctaatgtgaactagaaaccagtgatcatgctgtgccaagttagatttgtaagtcgtaaacaagctactattctcactggagatgtctagagtagaggagactgtgtatgccaggcagaaggcatgtggaaactcttagtgccttctctcagtttatatgtgtttgtgtgtatgtatacatctttgtgtgtatgtgtgtgcatgtacacgtgcgtacacacagaagtctgaagtcgatgttttcctatatcactctccaccttagtttttcagacagggtccctcatgaaacctggaattcaccagtttgttggggctaactggccagtgagctctgggcatcctcatgtctctgccttctcagctgggattccacgtgtttgccaccacatcctgcatttacacgggtgctgagaacccaagctcaggtcctcatcagtagggcaagcacttaactgactgggccatcttcccaggctcttctcttgctgtacaattaaaagtattctttgaaaaagtctaatatgcatgcctatatttccagcaccgagtaagtggagctaacctgggctagacagtaagacccggtcttgggggtggggaacacctaacaaaaaaataaaaacaaaacaaaacaaaacaaaaaccaaaaacattaaatgaagagccagggcagtgacaagacacgtgactcctcaatctctgtccaactctggaattcaataggctactttttctgttttcctcatccataaatagaaaaagggataactgtctcacaggattgtcacagaaattaaatgagatgctgctggatggattagcagtaggagcatgtagcagcagacctgtgcaactctgtgtctttccactgatggcatcataggctactgctgggcaaggacctattcatttcataatcgcctctacctagcccagtatgtggtgtttgagccccctgagtctgctgggttgatggtaagaactagcctagacttctctctctctctgttggacatttgagggttttctcaactttttgctatgagcaaagtacatctcaaaacccttttatttacatcacctaatttgatctgcatcccaggtgaagccagcagaagagggctgtttgcccacgcccacactctgagacagacagaatcactatggctcagagaagtgaagggacctcttcgggtcacaggtatatcagtgatggtgatgacgatggcggagcctctggccctgcttctctagcccctacctctgcagacctttttctctctgcctgctgccttctgcatcagaggtctcttaaaaaattgcagccttgtcacgctgggcctggtccttctgtccgctgtctggagggcagcacctttgcccagtggtccctgctggggattgtgaactgcaaactcccagatggcctctgaaatcaaatattttatttccaatgcctctattttcccagaatgaggagcacaccagttcccccacacacacacttgctttcgtccctataaagaggtgaggagatgactctccgtgtccaggaggaaggactttggctaaaaatagctgtggcgtgtggattagccagagtggtacccaggactgggaaagggagggggacgctgtggagctgtagccagactggttgccatagaaacgagagaggagcaggggaacctgggaagtggggatgacacagataccaagtcctagtctgagctgccgttacattcaggagaaacagcagtgtcggcggctcccaatctcagagggaacctagggtactgggggagatggtgtcagggacatggacgccaacccccaagggtctctgctgctggctactcttctctccaggctctgtgagttgagttgtgggacttggggtttgggcccctatttctgagccaagaggggtttgggtggagctgctcccagagggacttctccccgacagacccctttccaaaagataagccccctgtactggccagcgctctctagagggaggtggagtactccaagataatgtggtgctcggatcttactgaaaggggtcacagcatgcccaagaactgtggtcggaagaactggagttatttggagggaagaggaagaaatgaagacgttgctcttcaggtggtggacactgcacacctttcctgtcccatgaagaagagagcttttctcgagatggcaatggctaggatgtcatcagtaggctccctgggcagtcgtgttctgggaatgatcagacactgggaatccttccccattcctggccgtagatggaggtcagatcaccttagaccctacgaagactgtctagaagcccacctgaagttaatactaggatgaaagagacctggggtctcgaggcactgaaaacttacagatgaggtgcagaggacatcctgggctgcagagagggaaaaaacaagcctgcttgctgttgggggaggggaagatcttaatctgccattgccgaagtgttcccaggtcatgtctcctgacttccatggaaaataagtgtgtggggttacaaaccatctttttggggttttttccttgtgcctttctttaacatacacacaccctccaaaggtctgctggctacagaacacttggctccaaagtttaaaaatggaatgtcgggtttgtgggtatatattcatgcagtttctccctaggatctggtcaaacatccaaaccatctgagatccttatgtcacatttctgcccccacagggccacctgctctccccacttccccagccttcctgccccacccctcaccctgaatgggaggagatggcaaatcccaggaaagagaaaggaaggttgatgagtcttaatccttattctacagacttctgttcatacggtccatatctcctaggggaccctgaaagcctaggaaccgactctggccatccatctctccgggaagattataacccagagtgcttctcaggggggaagaatttgaagcaaaaccaggtgggttttgcttggaatctgggctttgtgtggaatgtgggctttgggacatatggcaggagtgggtggggttgctggtagggtagtaaatgcaaatcaggaaattggtagggggggtcgatgtgggtgtttggtgtttcgattggtctgatttcttatctcttagaagaatacgaatctgagagatactagactagcgtaactctggatggcctggcgcctccttcatccttgccgtgggcagttgagctcacgcgtggcccccaatctcctattgcccacccttttcagcgtgtctcctgtgggaaagagccctggcgggaaatgggctggtatcagagcatcagtgaccacggtgaagcagttagaattgccagtgggaagttcccaatgctgaggacatccaacctttgcacactggaggtttttgtgcacagtctgcattgctttctccttgggaagtctggggtggaggggaaatgtagcaggagaaagagtgaggccagggagaacaccgagggaacagtcttcaggtggggcttctggcaggatgctgaagagtgctgggggaagggataattgccagggaaagggctgtggaagtcctcatcgcagggagggctttgcatggagaaggaactgccaagaagtctacctcttcagtaccctaaatgtctgatccggggtgcctgtgagttgctacatacaccagcttgaggtagtgacgctgagatctgtgacatcgagatggctaatgcctcttttcttactgaacttcgacacccagtctgtgctctttatcctgtgtaatctgtacaactctctctctctctctctctctctctctctctctctcataattctttattcttttttaaaaagatttatttacttaatgtatatgattacactgccgctgccttcagacacatcagaagagggcataagatcccattacagattgttgtaagccaccatgtggttcctgggaattgaactcagaacctctctggaagtgcaggcagcgctcttaaccccgctgagtcacctctccagccatacaactttttcttaaccattgttttattttatgtaatagtttgccctcatgtacgtctgtgcattaccctcggaggccagcagagtgcgagttacagccggttgtgagccgacttgtgggtgctgggaatcgaaatcagatccgctggaagagcaaccagtgaatcatttgagccatctccccagcacttgtgccccaactttctgagatttatgggatgttagggattatcgttcccaatccaccagtggggaaaaactaaggctaaagagacaggaagggagattgtctcacagcattggccctgagttcggggcagatccatcaactcggcacacctttattaagaccccgcaggatccccgctgcggccgccatggcgcaggagaacgccgctttctctcccgggtcggaggagccgccacgccgccgcggtcgccagcgctacgtggagaaggacggtcgctgtaacgtgcagcagggcaacgtccgcgagacctaccgctacctgaccgacctgttcaccacgctggtggacctgcagtggcgcctcagcctgctcttcttcgtgctcgcctacgcgctcacttggctcttcttcggcgccatctggtggctcatcgcctacggccgcggcgacctggagcacctggaggacaccgcgtggaccccgtgcgtcaacaacctcaacggcttcgtggccgccttcctcttctccatcgagacggagaccaccatcggctatgggcaccgcgtcatcaccgaccagtgtcccgagggcatcgtgctgctgctgctgcaggctatcctgggctccatggtgaacgctttcatggtgggctgcatgttcgtcaagatctcgcagcccaacaagcgcgccgccactctcgtcttctcctcgcacgccgtggtgtctctgcgcgacgggcgcctctgtctcatgtttcgcgtgggcgacctgcgatcctcacacatcgtcgaggcctccatccgagccaagctcatccgctcccgtcagacgctcgagggcgagttcatccctttgcaccagaccgacctcagcgtgggctttgacacgggggacgaccgcctctttctcgtctcacctctcgtcatcagccacgaaatcgatgccgccagccccttctgggaggcatcgcgccgcgccctcgagagggacgacttcgagatcgtagtcattctcgagggcatggtggaggccacgggtgcgggcaggctggaggatgggagcagggatgcaggacaagggcaagaaaagcagccaggggaggcgcagaaagatggacagagaatggagtgtagggtgacaggcctgaggggtagcgggggccggggagaggacgggagatgacagggatggacagggtgactttgcagagtcaagaaaagcttggaagaggtctatgaaatggcactagcttgaggccctgacctgacagctatgtcactttgaactacattttacatctctgaattcatttaagcccagcaaagctcccctggaggttacttttgactgtgctcggttttcagagaatgagtagccccaaagaaaggtcccataaatagcccgctgtcacaagccaataaatagcacagcctgggttgaacataggacatctatcttcagtgtttcctggtacagtgttgggatgaaggttaagtgcagggttcttgaagcccagaggtccatagctctggaatttaactgacctaagtaaaagggaggtaggtaggaaaaagactagtactggagcaaaaacaggtccttgaagaggtcctagccgtcagggagcataaggaagacgcaggtgaaccaagaggccactaggaggagctgcggagctgctacggacaggctagctccctgctgctagccttgaaacctggctcctgggcctagacaaaaacatcatcttctccatggccacctcaggtcttcccactcccctctcctccttcactccaactaggctggttctagcccatgcccattccacactgctccctctgtctctgcgctgtccctctctctgacacaatctcggacaggtttctatcagggactttttcatctgccttctcttccccctctgccactgcctccactttgcacctaaccctactcccccaagccctacctctgcttctcaggccttctccctgcagaggccccggtggcctctctttccctacgatccctgatacatcttattccagctttgccaaagaataccaatgaccccaagatgtctcagggccagacttccgatgtcagagccggtctctgattagtgaatgcttactcctctgtttttgagatggattccggtttgggaagattctgaggtaggaacaaaatgatctgccccgaggggagggtgcacaaacccaacagagaagacaggacacaggctcagggcaagaactgggaaggggcagtgtaaaggacatggggatgggagcttgcttgacttttctagagataaggctgggaaggatggtagtattttgggattcaaactgcttttgaaaagcaagaataatgagccaaaacccaacatgatgacatttaaggggaataaatataaaattctacatttaggctttaaaaaaatcacttatgtaagcacagcatggaaaggctccggtggagaaagaactgggggttttagttggccactggctttgctgcagcaacgtgatgcagcttccaaaggcgtttatgtaatgtaatcatgggcccgcttcaccaaagcatctgggcgagaagcaagagatagtaagccttcttttatgcacagataaggccacagttgaaaaagcacttcagatgagcccttacctgggcctggtggccattctgatttgcaatgaagattgtaagctttgggggagtcagatgaagtaagaaatggccatgagtgttcaatctgaggaagagaagatgtaagggaaccccatatttacactcaagggggtgtcaggtggtaagggaatggaaccaggggccacgggtcctaggagacagattttagtttatgtaagagaaaacccagagccaaagagatgtctcagcttgcaaccacgcctgactactgacctgagttgaattaccaggtctcacattggggagtcaactgtctccccaagttgtcctctgacctccacatacatacatatgcacgcatatagacacataaatgtaaaacacatttgtaaagacgattggcacgttgcacaaaggactggacttttaatgagatggtgagctttcaatcctggggtgtaatcagttcagcccattgtctgggaatgcttgggggtgggtggaggcggctctgtgggaaacaggaaggttaggcttaaggttaagcttctcaatggagagtaggggaaaacataggctggcagatagagaagagggctaactaaaaagagaggtgggactctcagagagagaagagggttgtgggatgacagacaggagaaggaatcctctgtcaggggcccctttgactgatgccgcttctcctccccccaccccccaggaatgacgtgccaagctcgaagctcgtacctggtggatgaagtgttgtggggccaccggttcacatccgtgctcaccctggaggatggtttctatgaggtggactacgccagcttccacgaaacctttgaggtgcccacaccctcgtgcagtgctcgggaactggcagaagccgcggcccgccttgatgcccatctctactggtccatccccagcaggctggatgagaaggtggaggaagaaggggctggggagggggcaggtgcgggagatggagctgacaaggagcacaatggctgcctgccacccccagagagtgagtccaaggtgtgactggtttcctcccaccccctgtggcagaccagggggccggactcaggtacacagaagctgcgagtggaggtggaagaagaggaggcaggcagtgtcccgaggaacagctaaagttgggagaggcccgctgagtccaggatcgagtagggaaggctgaggtcctggtttgaagagagagggttgcagggcggggtgagagaacatgtcagtctgtctgtgtttgaccttcacatcggttcatgggtggatggatggacagaaggatgggctcatgggggttgatcgggaaggtggagcagatagagacagccaatggataatcgctcaggtggtaagtggcttggcagtcgatgatcgtcacctgcagcacacctttgtgagaaatccatgggcatccttttcttccagatataggtagcctcaaaccagggagcgtggcttagggagcaggctgtcaggtggactaccacccccactcacctcccctcaactggcctccctatgtgtgacacgcctgcctaactagagaagagagcactgggtagaggtgggcacaggtgtgggtgccctccccagcatcactgtcccatggcgagaggtcagaaaggcaaacaagcaatgggggtagatgctgagcagggaggggccctgaagcaggacctggggacagccaaggacaactattttgtgagagaggaatgaaaccttgcaggtcctgccacagaagcaagaagcagaggaaaggccatggagagacttaataaagggttttacaagggtacctggatcccagggggaagtagtttatccttggggcacagtggcagggctcattcagaacggtgagtaagtgtcaggtgtgatattcaaagacctggttcttaacacgagagcacagcgaaggtggaggtcagaaataactcccagccactgaaggaagtatggcttcagtctggagagctcagaaaagactcgaccctaggagcccacacaagcggttatagccacaagtgagagggcattagggacaggaagctaaggattgagtaaggcagtggggaatggtgggagccagcagttacaaagctttactcacctggatgggcttgttaaaacacagattaccagccccactccctgcattctgactcagtaggtccgggacggaaaccaaaaaaaaaaaaaaaaaatctgcacgtctaactagttcccagacctaacaggttcccagatcgcggtgacactgtctgtctggggactgcacttgggtgaagcatctaagcggaagagaagctggaggaactgaaaagcaccccaggttcctcaaggaacagagaaacaagaagggaaatgttggggagaggggacccaggtccagactcgaagggcttaactctgggtccaagaaacgtcattggtaactggccagtggcacccgagagggcaacagagataggagaaggccatttagggacccccaaggaggcagtggggggtctgtagctgaattggccttaccacaaaagaccaactctcttaagagactcacaaggcaagactgactaggggagaaaatggagcctgtacctacaggtgtctgctgtctgccacctgtcctcccaggacagggcaccctggagacacattccacctccactgcatccttgtcttgccccagtcatcttgggatggttgaggggacagcaacagcatggcaatggacctgaggctggcccccctggagctaagtgtagcccaagtgagcacgtaacctgataggactggctcagactctggccctggctatacccatccctgccctcgaataaaagtctgctgctctgtcccaggctaagaagccagcatccaatggggcatcgaggcctccctcccagtgcccagctcagagtgggtccacgcagagaggactcaagctgcctgttgcctctccccttccatctagcaatggccacaggtttcgggaccagctgggtcactctcaaagatgaggtccacgcacatgaacctgctgggatcccacgaacacatattggacctgagcacagggactgagcagggtttgaattcagagaaaatcgaggagtctagacaagaggggtggggtgcttggtatccgcacacgaagcaatggaatggagacattgaagctgttcctggaggtcactcagggcaccgctgtccagggcacagccaggagacctgtgttctagcaccaatgctgattgtcactaattacctctatgactctcagcaagacctattacttctctgggcctcagcttccttatctgttaaaaaaaaatgatatgttggcaaactcaataatgctcaataaactttcaactactgaatgaaaaaaggtagactggatgccgctcaaagtattaggacagctgaggctcttaggaccggagaaccctttaggcggggagttgcggctagccagcaggcaagtcctggcatcagatgtaagcagatgaggcggctcttgtgtacacagaggacacaggctctcccaactgctgctgtccttaagtaggcagccgtgttctgaagctcctattcggctgctgtcagagaataattaagggcaggaggaaaaagactgaggccccagggcctgtgggaggagtctggtccaagactagttcaaccaggagaaatggaccagaggagggtgtgccccagtctggagagctcagaaaagactcgtcccttggagctctgtgaaaggggcaaagctcagctggaactcacccctcctcttcctaggtcccccttcccaaatagaagccccattaggacttggctcagcacagacattttggacaacagatgggaccccggcatcccctcatgcagttggtgggtaacaaggcccacgaagggacagatggtgtttatggtgggaagagaggcccgggttgtccagcaaccaccctactaccaccccacccccacccccgatgctgccttttatagcttcaccgcaagagaagacacaacaggcctcgattttacaaaaccagtttattcacattttagaaaaactagtttgaggacaggaactggccttcctacaacatgagtgtgggactaagaacggcagccaggaaacttgagggaaggtggggacaggggagccatgtctcccactctaggtgatggctggtcaaataaattaaaggtgggctggacagagggagagggtatccaggcaaccagaggaggggtggcactggctggaagacagtcaacacctgcaagaactggaaagagcatgtggagtcggctgaggaagaggctccctttgacccttaccctgctatacgatcctgcaggactgtgaagctggctgcttctccccctgatggtgcccaggtacagctcagcacaggaagcctgaggaaaggcagttcctttccctcaccttggggtgctacagatcaccgcttccgcatcctcttcataaagcagcaggtgatggtagccaggacgctggcgccggtaactagggcgactcctgtacccaccaacaggggcacaaatagggtatccacagctggcagaaaagaagacaggctctgctcagagagtaccacggtatctgacactctcccctgcagattttctagactcagccctccccaagggagagctgagcgccagtcctgcctacctacacttcacacacaaacacaaccatcccccatcccccatccccaccccctcccctcggtctcagcactcaggccggcttggggcccttcatgcaaagggatgtggaaaaaggattgcaagggaagacaggaagatggaaaggggcaaacagagcaggaacaggtgggtagatggtggctgtcactcaccatgcgtgtaggggtagactgtaacaggcccggagcgcgcactgcctgcctggtaccagctgtagtccgcatgctgcacccaggcacttggggcacagtggtatatgccttcatcctcaggccccaagccatgcagtcttagccgatgacttctgggtcccaccagctccacactgacaggaccccctccaggccggactcccagctctgccacaccgtcctgacccactccacccacaagctgagcagggccagagctcagctcgccctcctctggcctctccacccaccagctggctgctagtcgcagccctggggggccgccccgcacagagatgttgcatagcagggaggccgtctctccccggtacacagtgccccctgctagccacgccacggcctctagcaccacgcctgcagagcaaagaacacgggggttaccaggtgaaggcccaggggctaagaggttaggaaataaattctataagttctgaaccccgtcaagggctcaacatcctcttaccttcttctctcacatgcacagggagaggccgggaacgagcactggccgcttcacgaagtcgggtcccagaccctcgaacataggctttggcgaggcagcggtaggtacctgcatcagcgggcctggcagcctccagccgcagtcggtaggttctggatgctactttctccatggcaatgtgccggtcctcatagccagggcccaggctgcctataccttccgtgtctagctgggccaccaggcggccgggtccaggagcccctgcaggggccatctcccagcccacagagtacgcagcatgacggcctggtgggggcagtgcaccggacacattgcacagcagttctaagggttcgcctgggccaatccgacgttcaccaggtcccacggtcaccgccagctggctggctgaaacacagcaggagatgggaggagtcactgagatgcctgggccccccacctgtaattcttctttgcagaaatttagaggcctcttatatctccctcaccccaggacccgaatttcacccttccccccatagcctttgtatctccatgcttgtgcggcactcccgatgcccaactgagagacacccccccccccccagtgggctatgctgcactcacatagagtctgcacatcaacatgagccaggactgccctcttctctgcgacctggacccaggagccgtcaggatcctgaatccactcagcggccgtacagtggtaggtgcccgagtctccagcctgggcacccccaaccaccattcggtaccgatcagtcccttccttgctcagccgaagctccccagaagctagcctctcagcgtagggcgctccagcctccaccgccatgtcggagcgcagtcccactacttcctgtagagtggctcgccccactggcgcctccggaatggctctcccaaaggacaccgacaggtgtgtgtgtttctttgttttggtctgagccaggcagcccagcgcaagctcctgcccctcgtgcactgtgaggcgtgagggggaggtggcagcctggcgccctcggggccctggaggggcagcagatacctgcagctcatctggaagaactggagagaaaggctttagtgagagagggcttggagcagcatccctcctgtttcctgtgcgtatcctgtttcactacacactctctaggcttctagaatgtaagaactgtgctctgtagcttttcttctataccgcagagatgccaagcttggtctgggcacatcaagatattcaataactacttgctgaacgtcacagagcaagcctactgacccctactctgatgtctaagactgatccattttaaatactcaaaaaaagtaatcctgtcttccttctctaaagataaagaggctggacctgatggtgccggcctataatcgcaactacccaggaagctaaggcagaagagtcaagttcaagggccgtctgggctacagaacaagttcagtgctggtctggtcaacttggaaagtttctgattcagcccatccccccccccaaaaaaaaaaaaaaaaaactgctggaaagactggcttgatggcactggagctgacacaatactgcctgagctacacagtgaattgtgggagttttgtcaccagtttcaggccaacctaggctagttgtaagctagcctgggctacaagagtgagccctcaaaaaacaacacagggaatatagcttagtagagtgctcccttggtatgttccatgctgtaggttcaatttccagtactgagaagatgggggtggggggagaagaggagaaggaagaagatgacagagaaggaggaagacgaagcaaaaatagatctgagcgtgctggcttatacctataaccccagtgcttgtgaggctctctcaccacctagctcagagcccagtacctctcagctccaccttggcactgtagttgcccaggtactgcgtatccgtggagggggtgtagcactcataaaagccagagtcctgggcctgcaggcgagcaatcttgagcaccaccgaatctcccttcaggcgctgcacctgcaggtcaccagatgccacacgaggcccaaagacagcataggagaactggctatccttggtgctgacaatgcccagggacgtagctggggcctctggtctgtacatgaaccactcgaagtcttgctgggcagggccctcatagtcactcacgttgcaggagatagagacagcggtgccagccacccggtaaagaggtcccctggggacatgcacctgccgggcgtagcacctggttcctgtggggtaaaagcagaaagaactggaatctttttagagagaacgagtccccacttgatggccagtatcatcagcaccattcttgactgctgcctgtgaaggaaagggaaacctagggatggttagaacatagctgggcaaagacacagatgggaacacaagatgggacacgagacaccagcatcccagcacatcacgtaggttcagatccacctgaacagaggaatactctagctaactagaggcagagcacctacatgaacagaggagtccatccggagtctggggtatagacagcccggtaagtaaaatgctttccatgcaagcatcaggacctgagttcaattcccggcaactatggaaaaagcttggcacggtggctggtgagtagccacataagcctgacaacctgggtttgagccccacaagggaaggaaggaactgaatcctgaaagttgtctcctctctctctctctctctctctctctctctctctctctctctctctcacacacacacacgcacacgcacacgcacacgaataaatgcagtggacggttcctgagccatgacccctgaggttgacctctgacctttacacagacacctgcacccatgcatacatgtggaccctcatacgcatgcaattggaaataacaaataaaagaagcatgcctgattcccaactctccagctcgtggctggatctttatcgctcctaccctgccatgtgtggcgtctctccgggctcagaaagaacttctagctaagggattctgagccttttgctggaggggagctgacaacatcttacagaaaggctgcttggcttagctctgtcacctgggctagacaatggagccagtggcccaggctggctggggtactgcactggatggggcaccatgctggacagggcacggacctagtcagtcctcactacacaataccctccccactacagctgtgccatgagctcactgcttctcccagcccacaaggctacacaggcagctgtggcttctggggcaagaaccaggctctgcccaggcctggggcagaagatcccttccccgcccccagaatctgtcaaccttctcgctaacccagatgatgcactatgcacagccccccaaacaaaagctttcatttacatatgatttgcctatctgcgcagcatttgcatagacctccttttaataaggagaccccaaacacctgctgccccttcccccttctctctctctccctccctccacccattttaccccaccactgttccaacagacagccggttccaaaaccttggactgttcagcttctttctcctctccactacttctaggtaagaccgcagaaccctagaatgcaagacgggctgtcaatcattcctcagatgagagaaatgaagaaactcccagagagcacctctagggagcattgccactaggttctaaccacagatgtgagtctagagctctctcccagccaacacggaaggcctggccgtgagaaccatctctcttctagatgagaaaagtaaagtgaaatgtgacattgtggccaagtccctgccctctctggagggcctctacacacccctgaagagggacaaaaccaagaaggcggagatgcttccaaggagagccctggtttacaaaactgtaatttcccggatttccaggggtaagtccacagcttgctactggccctggaggaaaccacccaagagcctgagagcctgctctacagttctcgctcctttccttcttctggctacgtcacgcagagaacacatgaccaccgcctgaagcagaggctagagtcagaaagccaacatgagaccaaccctttcctctcctggatctcagtttctatctctcagaactaagagctcccagttctgatgttgaacccgtgagtatatgtgtgtgactcaggcacatatcgctccaggcacatttcataatcaggaggatggttaaggcagccaagctgacaccatcctggctgcccatgggtaaactctgctgagaaggtcccctcccaccttcctggctccacacaagctgatgcttggagatccccatgggaaagttgtccccacagcctcaggacataggctgctacaaggttctcaatggctgggctgcctcctttctaacagccaaaggtctgctttgaagtcagttctgagttcaaatccacccccaccctcactggatacacagtggtatttcacgacatctgtgaagtgaatgccagtgctggctgcagtgggctaaaatgacattcagctcctctcccgcccctgaataacactcactcctcccaaccacccctgggctcatccctgctcgggttaagcccaaaggaaaagaagcaatcgctaggcaaccaagccccacagctccttcaactccctacatcactctgcctcccgccttgttcccaaaggagttttcatcctggccccagaagcccaaggaaccattctgtacaacactgcacagttctggtataaaccagagaaggaggttggggtgccccactatagtatcttctccatatgcatatcacacacacacacacacacacacacacacacacacacacacacgttcctttcaagggcttcagtctcctggcaactgctccatgccatatctttcccagaccacctcctacagggagccctccaagtcagaccccaaacatggtaatgttagcaacctccacaggcctcaacacacacacactcacactcacacacacacaccagacatgacgcaaggttggcccagaaaacacaccatcataaacacccaccaggacagacactgggtgcttagagatcccaggttcagtttccatggagcctagtttctcctgaggcagggatgttgggaccaactgagtctgacaaccaggcaaatatctgggagcgtggaagggcaaagagggaactggcccagggtggagacacgtgagggaagaagcctcagatggtgacatgttatattgggaggtgggggtgttggggagacttttttcagagatcgtggtcagaatcagcccctgggcctccagccaactctgggcaattatgaagaccgccaggcactgcccacgcagagcaaacacccaaaaccaggccttgagccgagagtggggcagaaggttgtcacggtatttggtagcaacgaccccagacgctgggtgtaaccgatgagaagtggtgcctgcctccggaggcccgatggtgtctcaggggatacctcagtaggtcgcccatatgccccagctaggaacctagagcgaggacaccaccaccctccccataactgattgggcagacaggcgcaaaaggaagcgagacgccgagcccagagacagtggaggcacgtctgttggagaagtagggatgcaaccagctctgaaatgctaggaaggtgggctggtgggctgcactatgttaggcacctacccggccgggacagggacgcggcgaccaccacctggcttaccaagtattagcagcagcagcaggagcgaactcagcggcgtggggctagggacgcccattctgcgtaggcggctctggggagactcctgggggcggcgtaggctctggggggccagggccgcggggggcgcatgcccaggtggggggcagaaagcggagcagtgaagcgtgggtgcgcagagcccagccgagcgggagccgccaactccccgccctccacccttcttcccctcctccctccgctcttcccgccctccgcagctcgggagaccagtcccagccgcgccccgctgcccggccccgcccccgcctcgccccgccccaggccgtcgcctcggccagacttcgaccctgatggtggctccgcctctggcctcaggctgggcgaactggcggcacctgggctcctctatccccatttcctcgctcagagggcaccccgccctgcacctgccagccttccagggagaatggggtgctttcagggcctctggggatgcatgatggggtgactgtggttacgcactcagaatccaattggg

SEQ ID NO: 1608 - DNA, 2267 bp, Mus musculus
ctgagctgccgttacattcaggagaaacagcagtgtcggcggctcccaatctcagagggaacctagggtactgggggagatggtgtcagggacatggacgccaacccccaagggtttctgctgctggctactcttctctccaggctctacttctgttcatacggtccatatctcctaggggaccctgaaagcctaggaaccgactctggccatccatctctccgggaagattataacccagagtgcttctcaggggggaagaatttgaagcaaaaccagaccccgcaggatccccgctgcggccgccatggcgcaggagaacgccgctttctctcccgggtcggaggagccgccacgccgccgcggtcgccagcgctacgtggagaaggacggtcgctgtaacgtgcagcagggcaacgtccgcgagacctaccgctacctgaccgacctgttcaccacgctggtggacctgcagtggcgcctcagactgctcttcttcgtgctcgcctacgcgctcacttggctcttcttcggtgtcatctggtggctcatcgcctacggtcgcggcgacctggagcacctggaggacaccgcgtggaccccgtgcgtcaacaacctcaacggcttcgtggccgccttcctcttctccatcgagacggagaccaccatcggctatgggcaccgcgtcatcaccgaccagtgtcccgagggcatcgtgctgctgctgctgcaggctatcctgggctccatggtgaacgctttcatggtgggctgcatgttcgtcaagatctcgcagcccaacaagcgcgccgccactctcgtcttctcctcgcacgccgtggtgtctctgcgcgacgggcgcctctgtctcatgtttcgcgtgggcgacctgcgatcctcacacatcgtcgaggcctccatccgagccaagctcatccgctcccgtcagacgctcgagggcgagttcatccctttgcaccagaccgacctcagcgtgggctttgacacgggggacgaccgcctctttctcgtctcacctctcgtcatcagccacgaaatcgatgccgccagccccttctgggaggcatcgcgccgcgccctcgagagggacgacttcgagatcgtagtcattctcgagggcatggtggaggccacgggaatgacgtgccaagctcgaagctcgtacctggtggatgaagtgttgtggggacaccggttcacatccgtgctcaccctggaggatggtttctatgaggtggactacgccagcttccacgaaacctttgaggtgcccacaccctcgtgcagtgctcgggaactggcagaagccgcggcccgccttgatgcccatctctactggtccatccccagcaggctggatgagaaggtggaggaagaaggggctggggaggggggcaggtgcgggagatggagctgacaaggagcacaatggctgccacccccagagagtgagtccaaggtgtgactggtttcctcccaccccctgtggcagaccagggggccggactcaggtacacagaagctgcgagtggaggtggaagaagaggaggcaggcagtgtcccgaggaacagctaaagttgggagaggcccgctgagtccaggatcgagtagggaaggctgaggtcctggtttgaagagagagggttgcagggcggggtgagagaacatgtcagtctgtctgtgtttgaccttcacatcggttcatgggtggatggatggacagaaggatgggctcatgggggttgatcgggaaggtggagcagatagagacagccaatggataatcgctcaggtggtaagtggcttggcagtcgatgatcgtcacctgcagcacacctttgtgagaaatccatgggcatccttttcttccagatataggtagcctcaaaccagggagcgtggcttagggagcaggctgtcaggtggactaccacccccactcacctcccctcaactggcctccctgatgtgtgacacgcctgcctaactagagaagagagcactgggtagaggtggacacaggtgtggctgccctccccagtatcactgtcccatggcgagaggtcagaaaggcaaacaaacaatgggggtagatgctgagcagggaggggccctgaagcaggacctggggacagccaaggacaactattttgtgagagaggaatgaaaccttgcaggtcctgccacagaagcaagaagcagaggaaaggccatggagagacttaataaagggttttacaaggga

SEQ ID NO: 1609 - DNA, 1131 bp, Mus musculus
atggcgcaggagaacgccgctttctctcccgggtcggaggagccgccacgccgccgcggtcgccagcgctacgtggagaaggacggtcgctgtaacgtgcagcagggcaacgtccgcgagacctaccgctacctgaccgacctgttcaccacgctggtggacctgcagtggcgcctcagactgctcttcttcgtgctcgcctacgcgctcacttggctcttcttcggtgtcatctggtggctcatcgcctacggtcgcggcgacctggagcacctggaggacaccgcgtggaccccgtgcgtcaacaacctcaacggcttcgtggccgccttcctcttctccatcgagacggagaccaccatcggctatgggcaccgcgtcatcaccgaccagtgtcccgagggcatcgtgctgctgctgctgcaggctatcctgggctccatggtgaacgctttcatggtgggctgcatgttcgtcaagatctcgcagcccaacaagcgcgccgccactctcgtcttctcctcgcacgccgtggtgtctctgcgcgacgggcgcctctgtctcatgtttcgcgtgggcgacctgcgatcctcacacatcgtcgaggcctccatccgagccaagctcatccgctcccgtcagacgctcgagggcgagttcatccctttgcaccagaccgacctcagcgtgggctttgacacgggggacgaccgcctctttctcgtctcacctctcgtcatcagccacgaaatcgatgccgccagccccttctgggaggcatcgcgccgcgccctcgagagggacgacttcgagatcgtagtcattctcgagggcatggtggaggccacgggaatgacgtgccaagctcgaagctcgtacctggtggatgaagtgttgtggggacaccggttcacatccgtgctcaccctggaggatggtttctatgaggtggactacgccagcttccacgaaacctttgaggtgcccacaccctcgtgcagtgctcgggaactggcagaagccgcggcccgccttgatgcccatctctactggtccatccccagcaggctggatgagaaggtggaggaagaaggggctggggaggggggcaggtgcgggagatggagctga

SEQ ID NO: 1610 - DNA, 27684 bp, Homo sapiens
ggagtaggagaaagctatggcattttaggaaaattaatcgggaggtgacaaaatagtttgaaccaagtggatatagtaggcaagtagacgatagaaaataattgcaataatataagcatgaagagatgacagcccaaatcagcgtggcaatggtgaaaagtggaacacagaaaatgaattggagtacagaaaaatcaaaagaaaatgaaaaaagtttgaagccaacttgacatgttgagcaaaagagggaagcttcagagatcatactagagtctcaagtcaggtgatcagaactgcgaggtcattcacgggcataggggagcctgggggggatcacacctggtgaggagactgaggtgggggaagaggaagtgatgagttcagagctggaagctgtggagaggggtcagaaccagagagagaaaggaggtcattgctgccagggcagtgtgagttgaagctatgagaacagggtagatcccaacaaagactgcacagagaaatgagagcctggcacagagagtgaggaacacctatgtttaggggatgggaagaagaaggacccccaaagagtgaaagagaatccaccagacaggcaggaaggagacaaagaaagtgagatgtcatggagctaaggaaggagagactgttaaggaggaggttctaacagtgccaacaagtacagagagaagaggcattgggtttggcagtgacaaagtctctagtgacatttgagagcaatttcagaagagtgagcaaggtgggaaccagattacaagttaccactagaaagtgagaaactgtcagcaagtataggttacacttttgagaactctactcatagagaggagagaaatagaaaccagacaatgtactagaaacaggccaggccaggtggctcatgcctgtaatcccagcactttgggaggccaaggtgggtggatcacctgaggtcaggagtttgagaccagcctggccaacatggcaaaaacccatctctactaaaaatacaaaaattagccgggcctggtggcacgcgcctgtaatcccagctacttgggagactgaggcatgtgaatcgcttgaacctgggaggcagaggttgcagtgagccgagatcacgccactgcactccagcctgggggacagagctagactctgtctccaaaaacaaaacaaaacaaaacacaaaataaaaagaaaaagaaacagtcttccagtttttcttcttcacactccgaatgccctctcttcctaagtcaatatggatgaggggctgtggtgaggtggtctgagggccagcctgcaagactggtataagacctttaagtttcaaaaaataggacatccaaaagatccttaagggggccacagtcttgacattcacagacagagaggacttaggcaggggtgtccaattttttggtttccctgggccacattggaagaagaagaattgtcttgggccacacataaaatacactaacactaacagtagctgatgagctttaaaaaaaaaaaatcacaaaaaaaaccctcatgatgttttaagaaagtttacaaatttgtgttgggcctcattcaaagctgtcctgggctgcatgcagcccacaggcggtgggttggacaagcttagcttggaggctctggtggaactccaaaataaacatgaagaacaccacagaagagaaagcaaagggactgtaatgatttatggatcattaacagacatttattgtgcacttattatttttccaaaaatgttatccatccatttagcttcaactaccacccatgtgtcaatatgtccagcccacccggatatccatttcaaactcaacatatttaaagtcgaacatgtcaccttgctcacaagagtgctcctctccatttattctctaccatggtagatacactatcatcacccaaccagaaacatggcagccatcctagattcttcaatcttcctcacctcatctcccttattgaatcaatgcatctgtattctaaatagcctcaatattgtccccttcctctctattccactatcattgctgtagtctaggacaccattacctctcaccaggtaataatagtttggatctttgatcctgctcaaatttcatgctggattttaatgccaatgctggacatgggcctggtgggaggtgttttgatcatgggggcaggtccctcagcggcttggtgctatcttcatgatagtgagttcttgtgagatctgggtgtttaaaagtatatggcaacatcccccatcatcaactctctcttgctcctgcttttgccatgtgatgtgcctgctcctgctttgccttccaccacgagtaaaagcttcctgaggtctcctgagaagctgagcagatgtcagcaccatgcttcctgtaaatcctgcagaactgtgtgccaattaaaccttttttctttataaattacccactctctgggtttttttttttttaatttttaatcttttttttttttttgagacagggtttcactctgtcccctaagctggagtgcagtggtgtgatcacagctcacttgtacccctgaactcctgtgctgaagtagtcttcctgcctcaacctcaaacgtagctggaactacaggtgttcaccattacacccagctatttttttttttttttaactttcagtagagacgaagaatcgctatgtagatcaggatggtcttgaacttgtgagctcaagcagtcctcccacctcagcctcccaaaatgctggattacaggcttgagccaccatggcctatctcaggtatttcattatagcaatgcaagaatggcctaatacaccagggctactgcagcagccttctaactactctccctgcctccagtcttcctccactctaataattctttggattatgaatttctttatttgaaagtaattaagcaccagtaaagtacatctctctgaaacacacatctgaccgtaccacttccaagttttaaaaccttcagtaactgccaactatctataagtaaagtccgagttcctttccctggaagagaaggcctattataacctggacctggtgccattccagccttatcttcttccactgcccctatacacccaaagctacagctacttcttttaacactcaaggttcagccttatgttctctttctgtgtcttgccccttgagcctttgtcatttacatagctccaacgattgtccctgagtgatgcccaaatctctatcttcaatcctacactctctttggagctccatatttctagttgcttgcaggggatttccatcttgacttgacaggccccaaactgaactcagtaccttcctccccaaaggtggaagtgctcgtgacttccttagttctgtgttactcctggtcaattagaataaaaaactacaagtgacctttactcttcaccgttgccttgggcccattcctggacatgtcaaataagccaacaaatgctgtcaagtctccctttctttcatctgtttgcaatgtgctttttcattcctatgaccactatcagaatcagaaagatcaggacctgacccatccttcacctttctctccagtctcaaaggaagaggcaacctgttttcatcatgtcggtccctgtgcccttgttttaaaaccccaaacagttgcctcgtgcttacaggtcacagtgaaggaggtcttcaccacagaagacctagaaaaaaaaaaaagaagataaaaaacgtgacaggccctcagactgaactcggcatctttctctctgaggctggaagtgctcatgacttccttaattctatgttacttctggtcaatcagactaaaaaactacaagtgatctacagaagtgtcctctactaacaatcagagtgaggatagagtcgggtgggactgggcagttagaaagactttataagtccttgaacagcaggggtgggagcttgtggaaaagtacacaggtagcttcaacagcactgtaatgttctgaatttaaaagagtgacttaaattgagtttttgttcttaaattatgctttataacatatagacatatgtccaccatctatattcttttgtacatatcaaatgtcaggttttcatttttaaatttgtttgcaaaagagaagtcctaggacagtctctaggagcccagtagggaatcagtaataaggggcataggacactaatatttgtgagtgtttactacatcagatagatcagaagatggggaaactgaagttctgaggagttaagtggtttgcctatggtaacatagctggaaagtgttttgagatttgaatccacatatatttgaccccaaagcttgtctcagaataatgccagagggaatttgcacgttttaaacacaatcttgccaaccagaggctatgacccctgagtacatgttggtatgaaaaattccccagaattacaacatccaatgtccaccatgaaacatgacagaggaaacttctctttttgaagacccctctctcttctttcagtttcccaacttgcgtcttccttattctcctccatttctcctttcagactcactgcttccagctttggcctcatctctacttttacttcatttgtaatggggcagaggctacctcagagcagaggaggaggagagttggggcgtgtcacctgttttagaaagaatccacaagtgggcagcagtctgaggggcttgcgctgggcaaagcagatgtggacagagggaatcaggaaagctttgggttgggaggcatgatagagactcagaatagtcagtatttaacaagtcaggggaagtggctagaaagaacagagacactggcatggctcaccacaggattcaggattccaagtggcgttttggtgctcacatcccacagtgcggaacaaattccattagtagtggagcatctcatagctgaatgactcaggccgcagaggagaaatccaagagaaggactgagctacattcccctagtcactaacgaatcattatgtaagtagatcaccccctttaaataaatgcaatatacacaaacccacatttataagacataatttagggaatacttagttacctactaaagaattctttcctttaaaaaagaaaaacatggccaggcacggtggctcatgcctgtaatcccagcactttgggaagccaaggtgggtggatcacctaaggtcaggagttcaagaccagcctggccaacatggtgaaaccccatctctactgaaaatacaaaaaaaaaaaaaaaattagccaggcatagtggtgtgtgcctgtaatctcagctactcaggagggcgaggcaagagaatcacttgaatccgggcggtgggggttgcagtgagcggagatcgcgccactgcactccagcctgggcaacagagcggaactctgtctcaaaaaggaataaaaaaaaaggaaaaaagaaaaaaacaaatttctctaactagggacttctagtacctttccagttgggtccaattgatagaaattccattaacatccaatgcactgtgataggagggaggcaactgggaataaagaaacacgaggaatctcgagtcgggtggcctgagtcttagtcctgactatgttcttgggacctattcctacctgtaaagtaagggctaatcctgtaccacctctaaccgtcatataacttttaaatcttagcctatctctacccagtcctataaagcaagatagaactctgtgtgaaggcttctgatcctcctgctctgctgaaagtagccagaaaggcagcaagctcctcagcctcaggaacccagcctgaggcgaggggctggctgaaattgcctccgtctggcctggagctgtgctctgcttctccccatttcactctaatcttcagcttcagtcatttgccacatctactccttcaaccatatctttcctctgctctgagttttctagagccccatcccccttgaatttatacaaatttttgcaatcaaccagattggcctccctgctccactaaactcatatcctcaactgtctgctgtcttccccatcatgcttcctcttccacttgccagattttgcacaagatgtctcatgatcttgtccagggaagcctccccagtttggctgatctcagggctgccacaaaggcacctgctgatggggcaagttgaggactgaactgcattcagcttgccaattcctgcacccagctcagagctgtgtctgctggaggaagggaaccttttattttctcccaaaagtatcacctgttccctgttctccaagtgacaggccacagtaggctctttttaagctcttttcctattttgcaccacggttcccttttttttttttttttttttttttttttttttatgagacaaggtctcactctgttgtccaggctggagtgcagtggcgcaatcacggctcactgcagccttgagctcccaggctcaggtgatcctcccacctcaacctccaaggtggctgggaccacatgcacataccactacacccatctaattttgtattttttgtagagacagggtttcgccatgttgcccaggctggtctccatctcctgggttcaagcgatccgtgcacctcagcctcccaaagtgctgggattataggttcgagccaccgtgccaagccaaaagctagaatcttgtctatgcttttgtgtcctggtgcctgggaaaactttttttctcctgcctcagttcagctcagtgataaataaggaactgaggttagataacaggtaaagtctaggacctgcaggatgagtgaatcaggtgagggagtggtagtcttcttccttgtcagccaggctaggttcaggggcacctggactgaggcgaggggctggctgaaattgccttgtggagggccctgccagtgatgccccctccagcaaatagggccagctctatgcaaatgtgttcttgcccaggagtttggtttcttctctctgagctcctggcacagtggaaccaatgtgagcagctgcttggcaggacagagaagggcaggctagcagtcccaaagctcgggtgacaggaccaggcccaggagacggggatgttgactggggctttaacagcactcttgatgccaatctcgggctgaaaactcgatatttccacttggaacaacaagaatcaccagcaagagagctgaggagagggcagtataccgggggcgccccctgcaggcctcacagggtggtgccagaacagaggaaggtggcacaggcagggtggggctttcaggacatccctgagatgatggtgatgacggtgacaatgatgatgaccatgaagaagacaatgaggaggaggaagaggaagacagtagctagcatttactgagtactaacaatgtgtcaggcattgccttatgtagtcttcatgacaaccctctaagagatgaataatatggttttcttttttttagatgaagaatctgaggtttaacgggttaaataattgctcaggttcacccagctagtagtggacagaggtgggatttgaacccaagtcattgcctcctgagcttatattatccagtaccgaatttcccaccttgccaggtcattccaggagcttctagccctccgtgtccatctctatgtcttcctgctcctctagctcatattttcttgatccaaatttaaaggatctggataagaatagatccatatctgggatataataatactgataacaacagcaacaacactttgcgtttgtaaaccactttcttctcttcattatttccctggggaaaaataaacaataagatatttctgtttctccaaattttgttctgatttttatcagtgttcctgaagctatttcaatatagtcatgatcaatttctaagaatatttttaggttctgcttttttatgtaacagtgtgttatatacacattcacatatttaaacacagcaattattatggctttacagtaacccatgatattaatattccacagatattacattactgaggcacactaggctaaggctgacaacaccaaatgctggcaggaatgtggagcaacaggaacaggaattcgtggctgatgggaatgcaaaatggtacagctactttggaagaaagtgtggcagtttcctaaaaaactaaacatactcttaccatacgatccaggaatcatgctccttggtatctacccaaaggagatgaaaacttacgtccacatgaaaatctgccgatggatgtttatagcagctgtattcatcatggccaaatcttgaaagcaaccgagatgtccttcagtaggtaaatagataaataaaccatggccatcctgaaatggaatattattcagtgccaaaaagaaatgaactacaaagccatgaaaagacatggaggaaccttaaatttacattactaagtgaaagaagccaatttgaaatggctacatattgtacaattccaacgacatgacattctggaaaaggaaaattatggaaacaggaaaaagagcagttgttgccaggggttagggaagggggattgactaggcagagcatagaggacttttacagcaatgagactataatggtggatacacatcattatatatttgtccaaacccacagagtgtacaacaccaaaagtgaaccctaatgtcagctatggactttgggcgattatgatgtcaatgtagcttcatcacttgtaacaaatgtgccattctggtggatgtgtggggacagggggcatacggaaaatctctataactttcctctcagttttgctctgaatctaaaactaccctttaagaagtcttcttttaaaacaatttacaaagcatgaggtgatacagatgtgggagtttggctcctgtctctgcccaactctgtgacattcgataaattacttaacatgtctctgtttcagtttcctcatctataactgggaaaaataacacctgtcttatagagttgccatggggatgacatgaggcatgtgtctcgttcatatcccatgctcagtgaattagtagcagcagccactgtgtgtttgtgtgtctttatccctcctgggttaatgagctccttgtgggcagggactcacccattctgtaaccaccccatctaacacactgcctggcacttgggctccgcagaagtttgccgagtgaatacttagtaagccctaacctaggcttttctctctggtggacatttgggttgtttctagggtttttgctatgaataaaacacatttcaaagccctttgtggtttttttggtttttgtttgtttgttttttcttcgtttgatctgctgactctgtgaagcaggcagaaaggggatatttgctcttgtccacaccctggtacagatggaataactgtggctcagggaagtgaagtgactcctatgggacacagtgcaaatcagtggcaataattagaacccctgaccctgcctcccttcctttagtagatctattttccttctagctaccgccttctggatccatggcctctccaaaactagaccatgatggtcagcctgacctgagagcagcacctgcacgcagagacccatgttgaaggtggtgagctgccagctaccagatggccctctgaaaccccagggaacctagcaccttattctcaaatacatgagggcttgtattttcccccaggaaggagcttcttaggaaagagccagcgtgccagctttgtttttctttcttcttctttttttttttttcctatgagggggtgaggagccaagctctgagttgtccaggaggagggactttggctaaaaatagctatggcgtgtggtttggatcaacccctagtggtacccaggactggggaggggagggggatgctctggagctgtcgccagactggttgccgtggaaacaagagaggagcaggggagcctgggaagtagggatgacacagatagcaagtcctagtcagagctgccgctacatttaggagaaacagcggtgtctgcggctcccacccttcggggggcccgtggggggggcggtgtcaggggcatggacgccaccccccaggggtctctgctgccggctactctcctctccacgtgctgtgagttgagttgcgggggacttggggtttgggcccctatttccaaggcaagtgggggtttgggaggagctggttcttgggggagttttcaccaggtctctccttccaaaaaatgagcccccttactccccagctctctagagggaggaagaggggcccaggaaaagtggtattgcaatcttctgcaaaggggtcatagcatgcacaagaaatgaggagtaggttggaggaactgaaattcttggagggaagatggagaaatcaagtccttgatcttgagatagaggtaacaatttcacacttttccttcccctgagaaaagtgcagtcccccactcaggaagacaggatgtgggacacattcaaaataaggtttacctagatccctggggcaatggagagtgagagagttctgggggtgatccgacatcggggttccttccccatccctgggcagagagatctgtctaggcaagccgactgggggtcagattacctaagaccctgagagaacatctggaagcccacctgggactaaagctaggataatgggagcagggtcgttttctgcatgacctggggtctctgagccagtcaatgcttactcttcctgaggacatctgagcttcaggaaaggaaaaggaagcccattgttgggggcaggggaaaccctaatcttccattgccatggggctcttggaccctgtgtcccctgactccatggacaataaatgcagggggtgcccctaagctcaaagccatttcattttgatttctcttcctaccttctctaccccaagacacacaaacacacacacacacaccctctccagagtgctgactgcagaggacctcaccccagaacataagatgctggagtgctaggtttagagtcacatacccaggcagtttctccccaggacctggtcaaccatccaggccatctgtggttcctatggcacactcctccatcccccacccactagccagcccacgtttccgtggagtgggaggagaggatcattcccaggaaagagaagggaaggtggaagagtcccaaatcctattctaaacctttccctgtatggtccatatctcctagaggaccctgggtgctttggggaagggctctggacctctctcagagcagattgcagctcagagagctcctcagaggcaagcatgtgaagaaaaatcaggtgggcttcgcttggaatgtgggctttggggcatatggcaggtgggggcggggctggtgttaggatagtccatgggaagtaagaggctgggggaaaatataactagagggagtggggaaataaatgtgggtgcttagtgcttcacctgatctgattccatgtctctcatgaagaataggatcccagagggatacgagcctaactctttataactctgggcttcctttcccaggcttctgtgttgggatcttccagttcccctccccatttgcaggctgtctccactaggagaaaaaacccaagggaaatgaggctggcccaagagcagcagtgatcgtgggtaggtctcagggaggatttctagtgggaatttcctaatgttccacccttgtgcactggagggtttccactgactttccacagctttcatttctttctcgtttgtaagcatgttgaggggagggaatggagcggagtgagtgaggtccaaggagggaagaatgagaaagactgtgtatcagtcttggggtgaacttcaaaacagcctgcgaggagagccattggtggctgcactggctacagctggggaagggatggtggaagtccttagggcagggagggctccattacccgcctgcccccctccccaaaaagcccccagtctattgatttcaggaaatcactagggggatctgggcctgggtctttggccccggggctgcccctgaggtgctgcacaccccagctggaggtgatggcaccaaaatatctggtacctccttcccctgaaaatcatcgtggaacttgcacagttctatccagttcaggtacatcattccatttgaccctcacaactttctgagcctggggggcagttagggctgaatgtgttattcccagaaatagaggccaggcaacacgaagggactcgcccagggccccccagggctcggtgctggccctgatgccccgtgcctccccatctcccgaggggccactcattcggcaaacctttattaagcccctccaggacccccgacgccgcctaggcgcccagcgacgcgcggcaggtggcagcagctcgggcccccgccgcactccaggcgcccgcagcgctcgccctgacgcggccgccatggcgcaggagaacgcggccttctcgcccgggcaggaggagccgccgcggcgccgcggccgccagcgctacgtggagaaggatggccggtgcaacgtgcagcagggcaacgtgcgcgagacataccgctacctgacggacctgttcaccacgctggtggacctgcagtggcgcctcagcctgttgttcttcgtcctggcctacgcgctcacctggctcttcttcggcgccatctggtggctgatcgcctacggccgcggcgacctggagcacctggaggacaccgcgtggacgccgtgcgtcaacaacctcaacggcttcgtggccgccttcctcttctccatcgagaccgagaccaccatcggctacgggcaccgcgtcatcaccgaccagtgccccgagggcatcgtgctgctgctgctgcaggccatcctgggctccatggtgaacgccttcatggtgggctgcatgttcgtcaagatctcgcagcccaacaagcgcgcagccacgctcgtcttctcctcgcacgccgtggtgtcgctgcgcgacgggcgcctctgcctcatgttccgcgtgggcgacttgcgctcctcacacatagtggaggcctccatccgcgccaagctcatccgctcgcgccagacgctggagggcgagttcatcccgctgcaccagaccgacctcagcgtgggcttcgacacgggagacgaccgcctcttcctcgtctcgccgctggttatcagccacgagatcgacgccgccagccccttctgggaggcgtcgcgccgtgccctcgagagggacgacttcgagatcgtcgttatcctcgagggcatggtggaagccacgggtgcgagcaggcctggggaggggagcggggttggcagagggtgggcgggaccgaggaaggcaggggcgagactaggggccaggggagctggggaggatggatggaggggctggtggaggatgagacagtgaggtgagacaggggtcggaggcgggagtggaaccgagcaacgccgcagaaggccaagagaaagcttggaggaattctccgaaatggcactggcgtggggccctgggcccagaggaatgtgtcacttggaatagggacagtaataatagctagtgctcgcccagtattcaccctgtgtcatgcgcagttccaaagcactttctacctctgagtcgatttaatcctaacaagaaccctctgaaggtaacttcttgttattgtgctcactttttagagatgagattgctccaatgagaaattaaggaagttgtccactttcctaagccaataagtggccatgcctggattggacacaggcaatgtggcttcaatgtttagtggtcccgagttggaaggaggggttaggttcaggggttttctcactgcagtcaggttcaggcccctggaatttgacggtgaaggttttccattgcctgagttatttctaggccggatcttgaggggagtttaatacctagtctcacttgtacctcggtttcccaattcatccatttccactgacaagggatatagatgatgttaccttttctagctcttttccaaaaggaactggcaactcatctgtgatgtcaataagtccaacccagacctacacagtgaaggctttgggagcaggtgaaaaaagaccagtgttacaggagtcgcaaaggaggtcacttaggacttgagatctagaggatagatgaggatgaggaaactgcgggtggaggaccaaaggcccactagggggcgccgcagtccctcctctgacgccagagctgctgatgctccctgccggcttcgctgacaagctggtgccttcagatcctttccctggcccctttaggctgagactccgcttcacaccccaaccccagctccgcatcactgttcccattcctgcttcaccccgactctttcctcttcccccactcaccccgttccctttcctctctctccagctgtcactccttttctgccagtatctcaggcaggcccctcaccctccagggaagttgctgcccggccctcttttctctttgtacccccagccctgccctctcctcctcgaagcccttctctccccagtgtcccttatgcctctttctcttctctcccactggatactttctattccaacttcaccgaggaataccaatgtctcagcgccaggctttccgagttgacagccactctccggttagctaatgttcactcttctgtttccccttgttccgagatggatatgggttgggggcaagaccctgtggcagaaaggagaatgacctgccctgaggggtgcaccagcccaacaggaagataggacacaagccccgggcagggaggaccaggacagaggagatgaggataggaatctgtctgtttttctagagagataaagctggaaaggatggtaatattttgggtgagacagtcaggattcaaaacgcttttgaaaagcaagaataatgagccaaaacccagcaagatgacatttaaaatgaataaatataaaattctacatttaggctttaaaaaaatcacttatgtaagcacagcatggaagagcactggtgaaaaaagaactgggagttttagttggctacagtcttgatgtcgtagcaatgtgatgcagcctccaaaatgattatgtaatgttatcctgggccctattagtgaaagcatcatggccagaagagagagatggtgcgcgctctcttatgcacggagcaggccacagttggaaaatttactatactcaaaatgcttaaagggccctccttggccattctggcttgtaatcaaaaaagtagagttctggaaaaccaggtcaaatgaggaatcgtggaggaagccagggatgttaagtcaagagagaaaacatgagggaatctgagactcctgttttcagatactcagaggactgtgaagtgggaggggaatgaagccaagagttggaaatcccagggtacaggttttagctctgtataaagaacaacccaactattagagctatcatacaaaggagtgggccctttatgaagtggtgagctatcaatcctgggaggtaatcaagtataagctagatgcccattgttagaaatgctcctttggggagccctgtatggagtgagaagttggactagaggatccctaaggttagtttcaaggttaagctttttttggttggcatcaccaaatgacaggaggggaaaaaagagctggacattaagaggagttggggcaaatggagaagacacgagggagctgggtaagaacaggagctagggagggggggaaatggactggaccaaagggaggtgggagcccttaggaaggaatagaagggagggtgctgggagtagggttgtggaatgagaagaggagagggaagcctggagctgagattccccctgaccggtgcccctcctcccaggaatgacatgccaagctcggagctcctacctggtagacgaggtgctgtggggccaccgcttcacgtcagtgctgactctggaggacggcttctacgaagtggactatgccagctttcacgagacttttgaggtgcccacaccttcgtgcagtgctcgagagctggcagaggctgccgcccgccttgatgcccatctctactggtccatccccagccggctggatgagaaggtggaggaggagggggcgggggagggggcgggtggggaagctggggctgacaaggagcagaatggctgcctgccacccccagagagtgagtccaaggtgtgaccagcttcctccagacccctgtggcagaccgggggccagacacagatacatggggaactgcatatcggaggtggtggaggaggaggaggaggaggaaggcaaagcccctggaaatgtgctaaagttggaaagtccccgtcccccagaacctcaagtctagaaaccagtatggaagggaggggtcctgatttcagggaaatggagggtggggccgggtgaaaatgccagtctgtgtttgaccttcacatttgttcatgagtggatggatggacagaatgatggacttttgggggttggatgggaagatggtagcagataaagacagctgacagatacatagatggaccagtagacaactggtccactcagggctgccactaacctgtagaacacccctgtgcaaattttaaaaaggaacccttttcctccagacagatacagccccaaaccagggtgcatggcttggggagcagagtataggatggattgcagtccccagtcacctcttctgccagcctccccacatatggcacaactgtctaatgacacggtaggccaagctgaagtgaaggagaaaggagccggaccaagatgggcacatgaggagggtgccctcctagctccaccctcaccaggatgaaggcgtgcaaggggctcagcaaggtgtgaatgaccttagtccgcaagttcagggaagcaggcagagcggggaggtgcctgagctggggcctggagaggggcctgggaaaggaaaaccagggatagctattttcttacagtggagtgagatcttacaggtatcaggcacaggcaggaagagagagagagaggttctggggaggaagggccaggagagagatctagaaagtgggttcactagagctgggaaacagggagcccctaggaaagcagtgtgtccttggggcacagtcattcacatcactgattgggtgccatgtggagtggacattcaaaaacctggttcctgtcctcaaaataaggggcacctgggaaaacagaggaatctacctgtggtgactgaacgagggataattcaaactgacaacctgtgcagtcccgtggagggtaggggagtgtgggtgatcagaaggctggggccagtgtaaggcatagggaatatgtaagtcaggagttagaaatctccagtgtgcgttggaatcacctggagggcttggtaaaacacagatttttgggctccactccaagggtttctgacccaagaggtggggaccaaaaccatgcattcctaagaagtccccaggtcatgctgctgttgctggactgaggaccacactttgagaacctgtgctctaagtgaatacttggaagtcgtttcaggacatggggcatagaaactgaggagtagctgagaggaagatgaagagaagctgagaagaagctgaggatcctcacaggagcagacagagaaatgtgaagggtggggttttatgtgtgggaaagggacccgaagcccaggctgaagagtttaactttgggcccagaaactcaaccatcaatggaaacagggcagtgacaagtggagggggtgtctggaagctgagcaggcccgacagagagatgaagccatcagaaggacttgagggggctcctggggaggtcggggggaggtggagcaggaagagttttaggggcaaaggacagaaccccttgtaggactggaggcaagattgaatgtgggagaaaatcggagagaagcgataggagttagaacatctggatgtgtctgcagcctgctgtcagcccaattgggccagggggtcccaaagacgcatattctcaccccacctccacctgcttcctgatcacatcccagtcaccagcggcagcttcctggatagtgagggagaacaactgcaagttgagagaggcagaggggtggaagggacctgaagctggcctggagaaaagcataggcccaggagagcctgccctgggacagcgcctgtctcccacacagcagcactggcccagcaaggacctcctcccttggccctggccacatcccactcctgccctttcataagccccctggggaaagcactccagtcttctctgttccaggctgggcagatagggtcctatggggcacagccagggtcctatgggcatagccagggccctatgggtcctctggaagcaagaaagggggccatggaagcagcccagacagctggggttcactcagagaggacccaagtcccagtcccttcctttcagtcaaaacacggatatctttgcctcaggtcacagggccactggggccctgtcatcaaagatgagattcctgaagcctggcattgactggtcccctaagaacagatgttgggatggagaatggggattcatttgggtttcagtaaaacaggggggtctggacaagagcgggtgggctacttggtatccacacacacgcactcacacaggagccaacccattgcagctgaacaagcagagaaactcagtctggaaaggcccctcctgcctgctgaagtcactgagaccctgccacacctctcctcgccactgtcaccactcagggcaccactgtacagtgcaacaagtcaggagacctaggtcctactcctgacacttgctaattagctctatgactctgggcaaatcgcatatctgggcctcagtttcctcatctgtaaaaatgacagcaaactcgtaatgctcaataaatgtttaaataacaactgaaggaggcctgccagatgcctcttaaggtgccgtgcaggtaagaattttaggatcagagaatccttaggcaagaaaattcatgaaactcctggggcactggaggaggggtgaagctgaagggtgggagggaggagaccccagggtaggtacaggcaggtgaagcgggtatatgcaggtgtagtgggtatatgcgggtagagggtatatgcaggtacagcgagtacatgtgggtgcaatggctctgtggacacacaggccctcccctgactgcctgttgtcccagcctgagtatcagttgtgttctgaggcttctattctgctgctatgggtcagaaggaacaacaatttcagccccagggcctagtgggaggagtcaggtccaagactagcctgaccaggagaatgagacgtgggaagagttggggaaagtctgggaagctcagaaaaggcactgcccctggaggcccatgccctttaacatgggagaagctggtgcgggggtgaccacaggcagctggaacctaccctccttttctatgcttccctccccaagtaggagtccaatcaggagttgtctcagccccgacagttcaggctgcagatggaacccaggtgtcccctcctggggtgggtggcatggcccatggaggccagatggtgtttgtggtgggaagagaggcctgggtcatccagaataggttgtcaatccccaaccacctccctactatgcaccctgagcgttttacagtctcatggtagggaagacacagccaagcctgctttttataaaacaagtttattcacattttagaaaaactaattccaggacaggaaatggcctccctataggatccctaagagatcaagaacagaaggccagagggaggggcttgggagggaaggagtggggaaggggaggcacgtctcccattctgggtagtgggaggtcaaataaattaaaggaagagtggacagagggagagggtgtccaggcaaccagaggagggcttggagctgggccggaagacagtcgacacctgcaagacctgaaaagggtgcccggtgtgggctaaggacagagagccctgagtggggctccctcgcggcctccaccccttaacagggccctgtggatctgagctgcctactcctcctccaggtggggcctgggagggagcagcttggttcaggacttgggggtgggaagcccaatgaaaacaaggttggggggttcttttccctcacctggggagtaagggatcaccgttttcgaagcctcttcatgaagcagcaagtgatggtaccaaggacagtggcaccagtgactagggccacccctgtacccaccagcagaggcacaaatagggtgtccagggctgggggagagaggatgactgttcagagaggatgccatcatcctccacccatacacttgcctctgcgctttccccatcaagttctctgaacccaccttctccattcacagacacccccatccctgcccacagcctgccccctcagcatgcaagtcagcatcaaccacagaggaccccgtgcaggtgggcactgcagggctggaagttggattttttgagacttcatgtgacataatgtggaggagagagatagtagcaggagggtcagaagatgggaagggaaggccagtggcagaggccaggaggaaggcagagtgaggagggtggagggggtgtcactcaccatgcatgtaggggtagactgtaacaggccctgagcgggcactgcccgcctggtaccagctgtagtcggcatgctgcacccaggcgctgggggcacagtggtacacgccttcatcctcgggccccaagctgtgtagtctcagccgatggcttcggggccccaccagctctacgctgacagggcctcctccaggccggactcccagctctgccacaccatcctggcctacgccacccaccagctgggcagggacagagctgagctctccgtcctctggtcgctccacccaccagctggcggccagccgcagtcctggggggccaccccgcacagagatgttgcacagcagggaggcagtctccccgcggtacactgtgcctcctgctagccatgccacagcctccagcaccacacctgcagaacaaaggacatggggtcagagggtgcagggccagggagcatggggttagggctgccgccaagcaccgccccaggaaactcagggtattcccacaatcttggtagaagaggagcgtgaggctgtggcctgcaaacagctgacggagagggaggggtcatggaaacagaaggaaaaggggttgacaatcctcgaaccccgtccagggcccagccccctctcaccttcctcccgcacatgtacagggagaggccgggaacgggcactggctgcttcacgaagccgggtcccagaccctcgaacataggctttggcgaggcagcggtaggtgcccgcatcaccaggcctggcagcctctagccgtagccggtatgttctggatgccaccttctccatggcaatgtgtcggccctcatagccagggcccaggctgcccacaccctctgtgtccagctgggctaccaggcggccgggccccaggtgcccccgcaggtgccatctcccaacctacagagtatgcagcatgacggcctgctgggggaagtgcccctgacacattgcacagcagttccaagggctcccctgggccgatccgacgttcaccaggccccactgtcactgccagctggctggctgaaacacaggtaggggaagaggtgtcatggaggcaggaggggacacagaggcacccgattccccaacttcctgtttcctacttgacagcagcaacttcaaaacctcctgtctccccctcactaggtatgaccatctttctatttaggggcttgaatctcacccctcagcatgggcctcctatctctatacccaatttctgagcagagaaaacccatcaagggccgggggagagaaatgctagcaaggctgctcactctgtggaagatgagttccttggagtcagatgatggctatctggtaccccctgtggccacagtgcccaccaggatactgtccctcccagctcccacagtgggatgtataagtggcacttacacagcgtctgcacatccacgtgggccaggacggcccttttctctgcaatctgggcccagctgccatcaggatcctgaatccactcagcggcagtgcagtggtaggtgcctgcgtcccctgcctgggcaccccctactaccatgcggtaccgatcggtcccttccttgcccagacgaagctcccctgcagccaatcgctcagcatagggagctccagcctccacggccaagtctgaccggattcccaccacttcctgcagagttgaccgcccaactggtgcctcgggcacagatcgcccaaaggacactgccaggtgtgtgtgcttctgtgtgcttgtcctcgccaggcagcccagtgccagctcctgcccctcatgcaccgtcatgcgtgggggtgaggttggggcctggcggcctcggggccctgggggggcagcagacacctggaggacatctggaagaactggagagaacagctggagtgagggagggctgggagctggcagcccttgttactgtttcctgtgtatagcctatctccctaaataaactgtgagctcccagagggcaaagatcgcatgttgtattatttcttctgtaactcagtggtgccaagggcagtactgggcacagcacaggcgctcaataaatacttgtagaatttcatagaaccagcccatcgcctactcacccttatgtttgagactgacctctgtttgaaatactgagaaaagcggctctttcttctcagaagacaaagaaacttaagagagtgagaatgtcacatggtctaactccttccctaactctactctctttcccagatctgggtcctgtactgtccaggagtagaggctattcaacccaacagtcttcttcgttcttgggaatggaaagtggactggacaacttaaggacatttcttctcccaggaggggtcttaatatgataagatgagcactggcctgggtgaggaactctgggtttgagtcccacatcagccactgagttattgggtgactttgtgcaaatcacttaacctctttgggcctcaagttccttggctacaaaacctaaggggcaactagataggtcacttgtggccttgactttctgccttgagagggtgtgtggctccaccccgtcccagggcccagtacctctcagctccaccttgccgctgtagctgcccaggtagcgggtatcagtggagggggtgtggcactcataaatgccggcatcctgggcctgcaggcgggcaatcttgagcaccacggcatcaccttgtaggcgctgcacctgcacctcacccgccaccactcgggacttgaagacagcataggagaactgggtatccttggtactgacaatgcccagtgcagtatctggggcctcgggcctatacaggaaccactcgaagttctgctgggcagggccctcatagccggtcacattgcaggagatggagacagctgtgccagccacgcggtacaagggcccctcggggaccagcacctcccgggcccagcatcccattcctgtagggaaaggcagaaggagttggagatgcctggttcctcattccatgccctctgccgccacaagcaccattcttgatctctgcctacaaaaggaaaggagacctgggaaagcttgtccacagcttggaccctgttctgagaataggaaagggatgctgtgatataagacacctggatctcaaggaggtggcatgggcccaggattgccttggcatccagatgcatcccatttctggcggactagaagcagagcacctgaaggcagaaaggagtacatctgattcctgacctaaccaggccttggttccaactgaaccttgatctgtccctgccactcacccacctccatgtctgccattccttcctcagcacctggcaaggggagccttctggctaggggactctgagactacatgtccctctcctttgcttgaggggagctggcagtcttgctcagaagtgctagttggctcagctgtgtcacctgggcgagacaatggagccagtgaccctagctggaaagggcacaggcccagtcagttctcaccacacaatgccctcccctctccagctgcgccatgagctcactgcttctctcaccccacagggctgcccaggcagctggggcttctggggcaagatccaggctctgccctggccattgggggcagaagatcccctcctccagtgcctgccaaccttccgggctagcccagcagatacagaaggtgcctgccccagttccttaacaaaagccttcatttgcacatggtatgcattcatttacatatatggctctctttctgtagggaggcactaaatccccagctgccccttctcatctctctcccttcagaaaggccaaacctctcttcttcaccctactccacccctatgcccaaccctaccccagcagatactcctggcagacttagagggcttagctcctcccttctttccttccatagctcccactagataagatcacagaacctcaatgtaaagagggctaggccacccctccccacctctcccaattttacagatgagaaaggtaaggcaggaaaagtataatatgttagccaagatcatgctgtccctagatggcttccacacactcctccagaggggcaaaaccagagaggaagatggggaaactccaaggccaggcctgaagggactgacctcaccaaccagagtgtcacttttaggcctcccagggggataccatggactttctgcaggagctagaggaaaatgcccaggagtctgtggtcaaactctaccctccagcttctctagaacggctcctctgaacttccccacccctgcttctgggctcctagccccttccttcatcctctggctgggtcacagggagaactcatggtctgttgttaagggcacagctgccagtcaggaagtgggattccagcaccatccccatgcccagctgtgtggcctgggatccagtctctttctgtcctaggcctcagtttccacactggaggagaactaagagctccagctctgaccatgtgtgagtgcgtatgtgactcaggagagccctgccccaggccaggcaagtttcataatcagagtgacggtggagacagccaagctgacaccttccctgactgcctcagggcagactgctcagaaggccccctcccattttcctggctccacaactgctgatgcttggagatgcccatgggaaagtcacctccacagccttaggaaatcagttgccacacagctctctctcccctcctctgtatcagtcgcagcaaggaaagggacagcaaagaggcctgctttggaatcagatctgtgttcaaatcctagccccaacactcactaaatgtgctctctggggcaagttacttcattttcctcatttgtgaaatgaatgtaagtgcccacaggcagtgggtgctcagacctctgcgtgctcctttttcaaacacaggccagcacttccccacctccctgggctcctccctgctccatgctgcccactggggaaaacacaccaagtgctaggcaacccaggccccacagcgccttcctctctgtacatcctcctgccacctgcccagggaccagggagaggactcatcctaaccctgcagggcccagggacctgcagcaggggaaggctttgcttggtgccactgtggagctctggtctagaaacaggcagctggggctaccttcagcctctgccttgacgacagcagctctgaagtcaccatccccacccccacgcttcactctcatttcaagggcttcagcctcatcaacatctgtactggcagtttcactgtctccatgccatactcttccccagaccacctcctacagggagccctccagttcaggccaaaaacaattccactgtcattatccccatgcatccatgcaagattggcccagaacaccccaccatgaacacccaccacagcaggcacaaggtgcttggagatcccaggatcagtctccatggaacctggtttctcctgaggcaaggaagctggaactaagcggtgtgaaaactgatgggtggctgcagagccaagtgccatttgggagacaggaagaagggcaaagagggacccaacccagggtggagatgggggtgagagagggaactgcccccagttgatgaagtgcgtggagcgcaactgggagagacttacttcaaagatcgtgggcagaactggcctctgggcctccagccaactctggggcaattatgaagctgggcaggcactgccctcgtagggcgggcacccaaggccaggcctggagctgagtgtggggcagaaaggagtcgcagcatttggtgcagcgaccccagtacgtgggtatgctagctgagatgtgtggcctgccccgggaggccgagcagtgcctggggcagcaccttagtgggtcctctctacgccccagtccctggcttagagctggggagcctgcactcttcccaagactggctcggcggacagccacaaagcgcagctggacgccgaccccggggaggctggaggtacccctgacggaggaggatgtgaggagccccgaaatgctaggggggtgctggatggcaggcacctgcccggcagggccgggaaccggaacgggggcctggcttacctagcattagcagcagcagcagcggcagcgaaggcggcagcagcgtgggcctgagggcgcccatcctgcgcggccagctctggggaggctccgggggatggcgcgggttctggggggccggaagggtggggggcgcatgcccaggttgagggcaggaagcggggcagcgaggcgtgggtgcgccgagcgagctgaactggagctgccgaatcccctccctccgcccctcccgctgctttccctccagccctcggcagttctgaaaccattctcgccccggcccgccccggcaccgccccttccaccgccccgtctaggcccgccaggactacagtcggactccaatcctggctcctccccgggccccggccccgccccagtcccaagccgcaccccttccccgtccccgcagggctaacgtcagcctccaatcctggctccgccctggaccccggcctcgccccgcccctggccctggctccgcccgaggcccccgcaggagtgagctaactgcacctctgcgcatcgaaattcccacccaccctcgcacagagcgcattccaccccgcacctgccagcctttcctggagagttgggtgcagggtccctgggattggcgaggtgactgtgaccacgcatttagaattcagttatttgctctgagccatagtcctcgctgcaaaccctgctgaagtaggggttggcggaagccaggagttcctgaatgcgaagggtttgagctgaagggcgcttccaggatccagaaggtcactggagacctgtttttcaccccctcagagggcaaaaccaaaagaaaaatggattaggagaggggg

SEQ ID NO: 1611 - DNA, 3029 bp, Homo sapiens
acatttaggagaaacagcggtgtctgcggctcccacccttcggggggcccgtggggggggcggtgtcaggggcatggacgccaccccccaggggtctctgctgccggctactctcctctccacgtgctcccctccaggacccccgacgccgcctaggcgcccagcgacgcgcggcaggtggcagcagctcgggcccccgccgcactccaggcgcccgcagcgctcgccctgacgcggccgccatggcgcaggagaacgcggccttctcgcccgggcaggaggagccgccgcggcgccgcggccgccagcgctacgtggagaaggatggccggtgcaacgtgcagcagggcaacgtgcgcgagacataccgctacctgacggacctgttcaccacgctggtggacctgcagtggcgcctcagcctgttgttcttcgtcctggcctacgcgctcacctggctcttcttcggcgccatctggtggctgatcgcctacggccgcggcgacctggagcacctggaggacaccgcgtggacgccgtgcgtcaacaacctcaacggcttcgtggccgccttcctcttctccatcgagaccgagaccaccatcggctacgggcaccgcgtcatcaccgaccagtgccccgagggcatcgtgctgctgctgctgcaggccatcctgggctccatggtgaacgccttcatggtgggctgcatgttcgtcaagatctcgcagcccaacaagcgcgcagccacgctcgtcttctcctcgcacgccgtggtgtcgctgcgcgacgggcgcctctgcctcatgttccgcgtgggcgacttgcgctcctcacacatagtggaggcctccatccgcgccaagctcatccgctcgcgccagacgctggagggcgagttcatcccgctgcaccagaccgacctcagcgtgggcttcgacacgggagacgaccgcctcttcctcgtctcgccgctggttatcagccacgagatcgacgccgccagccccttctgggaggcgtcgcgccgtgccctcgagagggacgacttcgagatcgtcgttatcctcgagggcatggtggaagccacgggaatgacatgccaagctcggagctcctacctggtagacgaggtgctgtggggccaccgcttcacgtcagtgctgactctggaggacggcttctacgaagtggactatgccagctttcacgagacttttgaggtgcccacaccttcgtgcagtgctcgagagctggcagaggctgccgcccgccttgatgcccatctctactggtccatccccagccggctggatgagaaggtggaggaggagggggcgggggagggggcgggtggggaagctggggctgacaaggagcagaatggctgcctgccacccccagagagtgagtccaaggtgtgaccagcttcctccagacccctgtggcagaccgggggccagacacagatacatggggaactgcatatcggaggtggtggaggaggaggaggaggaggaaggcaaagcccctggaaatgtgctaaagttggaaagtccccgtcccccagaacctcaagtctagaaaccagtatggaagggaggggtcctgatttcagggaaatggagggtggggccgggtgaaaatgccagtctgtgtttgaccttcacatttgttcatgagtggatggatggacagaatgatggacttttgggggttggatgggaagatggtagcagataaagacagctgacagatacatagatggaccagtagacaactggtccactcagggctgccactaacctgtagaacacccctgtgcaaattttaaaaaggaacccttttcctccagacagatacagccccaaaccagggtgcatggcttggggagcagagtataggatggattgcagtccccagtcacctcttctgccagcctccccacatatggcacaactgtctaatgacacggtaggccaagctgaagtgaaggagaaaggagccggaccaagatgggcacatgaggagggtgccctcctagctccaccctcaccaggatgaaggcgtgcaaggggctcagcaaggtgtgaatgaccttagtccgcaagttcagggaagcaggcagagcggggaggtgcctgagctggggcctggagaggggcctgggaaaggaaaaccagggatagctattttcttacagtggagtgagatcttacaggtatcaggcacaggcaggaagagagagagagaggttctggggaggaagggccaggagagagatctagaaagtgggttcactagagctgggaaacagggagcccctaggaaagcagtgtgtccttggggcacagtcattcacatcactgattgggtgccatgtggagtggacattcaaaaacctggttcctgtcctcaaaataaggggcacctgggaaaacagaggaatctacctgtggtgactgaacgagggataattcaaactgacaacctgtgcagtcccgtggagggtaggggagtgtgggtgatcagaaggctggggccagtgtaaggcatagggaatatgtaagtcaggagttagaaatctccagtgtgcgttggaatcacctggagggcttggtaaaacacagatttttgggctccactccaagggtttctgacccaagaggtggggaccaaaaccatgcattcctaagaagtccccaggtcatgctgctgttgctggactgaggaccacactttgagaacctgtgctctaagtgaatacttggaagtcgtttcaggacatggggcatagaaactgaggagtagctgagaggaagatgaagagaagctgagaagaagctgaggatcctcacaggagcagacagagaaatgtgaagggtggggttttatgtgtgggaaagggacccgaagcccaggctgaagagtttaactttgggcccagaaactcaaccatcaatggaaacagggcagtgacaagtggagggggtgtctggaagctgagcaggcccgacagagagatgaag

SEQ ID NO: 1612 - DNA, 1182 bp, Homo sapiens
atggcgcaggagaacgcggccttctcgcccgggcaggaggagccgccgcggcgccgcggccgccagcgctacgtggagaaggatggccggtgcaacgtgcagcagggcaacgtgcgcgagacataccgctacctgacggacctgttcaccacgctggtggacctgcagtggcgcctcagcctgttgttcttcgtcctggcctacgcgctcacctggctcttcttcggcgccatctggtggctgatcgcctacggccgcggcgacctggagcacctggaggacaccgcgtggacgccgtgcgtcaacaacctcaacggcttcgtggccgccttcctcttctccatcgagaccgagaccaccatcggctacgggcaccgcgtcatcaccgaccagtgccccgagggcatcgtgctgctgctgctgcaggccatcctgggctccatggtgaacgccttcatggtgggctgcatgttcgtcaagatctcgcagcccaacaagcgcgcagccacgctcgtcttctcctcgcacgccgtggtgtcgctgcgcgacgggcgcctctgcctcatgttccgcgtgggcgacttgcgctcctcacacatagtggaggcctccatccgcgccaagctcatccgctcgcgccagacgctggagggcgagttcatcccgctgcaccagaccgacctcagcgtgggcttcgacacgggagacgaccgcctcttcctcgtctcgccgctggttatcagccacgagatcgacgccgccagccccttctgggaggcgtcgcgccgtgccctcgagagggacgacttcgagatcgtcgttatcctcgagggcatggtggaagccacgggaatgacatgccaagctcggagctcctacctggtagacgaggtgctgtggggccaccgcttcacgtcagtgctgactctggaggacggcttctacgaagtggactatgccagctttcacgagacttttgaggtgcccacaccttcgtgcagtgctcgagagctggcagaggctgccgcccgccttgatgcccatctctactggtccatccccagccggctggatgagaaggtggaggaggagggggcgggggagggggcgggtggggaagctggggctgacaaggagcagaatggctgcctgccacccccagagagtgagtccaaggtgtga

SEQ ID NO: 1613 - DNA, 68233 bp, Mus musculus
ttaggtagatagttggctttatacttgctacatatgccagcttggcttcaaacttgagctgatcctcctgcccctgtctcctgcctctgcttcccaagtgctgagattacaagctgtctgtacggttgtacgtggcctttttatcttgtttatgtgaattattttatcttacttaactagaatgtaaagaggctcctgtgttaatcttatatatgccgcatgctaccacacagtgagatagatagtagtagataaatatttacttaactataatgtaattatttctttggttagtatttttcccttggcattttagaatttttactttaaaaacctttctagctcattgtctaccaaagattccagagcttcactttagacaaacatcactgttactcagaagtctagtctgggtatagaaacggattcattagtatgtagtgttcatgttagtaaatctcccagccttttatcaagatggtactgatgactgcacttgaactgttaatctcctgcctgccgtaggagatagagactgcgatgtctaagcttcataaagaaacggagtgtgtgaccttgcacaccagtcgtccttagctcttcttagtaaggaagcaggtgatggtagttgtggctagtgcatttcctcggtgcgtgttgcatttttgttggtttgttttgagacagagtcccacgtagcccagggtaacctctagctatgtagctgaggtggttgagccaatccttccagtcttaaccatgcctggttaagtttgttgcttttaaatacaatcaaggaggtcggcagtctgagtctggaagtgagtgacagaagaataaaatgccccgtcgtcgcttcagggaagagggcagtgggcttggggcctgttgcacataactgacgttgacaccataaaggtgtcatgtggtttagtatttttatcttggctcttggttctctttcagactagagcttcaagtttcttacaatattttggtgcaactcaggggtgaagtgtgttaaaaataacttgataatagttgatatcctggacttttgtttcagtctctgaagaattggatgcaagtcaggtttatgatgtctaaccctttcctcttaatgccttgtgcatgcttcttttaagaatagaattcttggaggtttatctagaactgtgtcaaatcccgtttcttttgataactgcatcttgcatctgttctgtctacatagttactgcttacctcaaacttgctgattgatctctctgattatcttcattccagcccacagcagaatgctctgatttgtgtattaggaagaagggatctgggagatggctcagtgggcaaagtgcttgctatgcaagcatgaaggccagagtttgaacctagcactcctgtggtagccagtgcctgtacttccagtgctgaggaggtggaggctggtgggtcccgggcacacatgcacacacccaaggaagccagaagagggcgctgggtcctttggagcacttgtgaacctccctatttgagtactgggaaccaaactctggtcttctgaaaagtgttcataactactgaatcatctctctatccctatctgttcatttttttaaagacacatcgcgcgcgtgtgtgtgtatgtgtgtgtgtgtgtgtgtaaaaattaggccagacacaacagtgggtagcagatagcttaaacatcaataaattcatctttaaaatgtggttgtggaggccatacaataaagttaatgcagatttcaaattttactttggttaaaatgagattatggaattgataggctactgagaaatttaactgaaaatctgaaagaaaaggacaaatagccccttggtcagtgagattaatagtttgttttagaaagataagatgtacttttaaatattgtctaggttgaaatgccttcttttaaaaggtatgcttagggagagcacttgtaatgtgtatgatggggttccagatagctttaatatgtgagtttatttttagtcatctatatttaaagaactgtaaaattagccatatgcatgaaaagtaggcaaaagataccaaagtcctcactgatgattcatggatgagcagagtagactggccggtaaatacagcttacagcttgcagggacattatttctttatcagcaaagcaatcagcagggagccttttaatatttcacagcagcagactacctaggtgatcctggctctgtaaattatattgttatcagtatttatttgtataagaaaatttgagtagcttgctactaaattaaaatatttacagtataactgactgtaaaaactgtatttcagcaacacaggtaattatgcttattttattatgttaccagtggtcattttaattggtaggcttctaagagatttgtgtatttttttatactccttaattttaaaaaatagttttctattctctatactgtgagtgtgtgtgtggtggtgggatcaaatgcagagccttgaatatgctaagcaagagttctaccactgagctgtatccctagcccaatatataatatctgtgattctaagaattctttaggggctaaagagatggctcaatagttaaaatctcttactgttcatgcatgtatacacacacagtggtgttcatgcatgtatacacacacagtggtggtggtggtggtgttattttgaggcagcatctctttatataaccttggctatcttgcctctgcctctagtgcagggattaaaggtgtgtgctaccacatagagctttagttttacttttgaaacagaatctttcaatagccttgagctcaccaagcaggctatgcaaacaggatagtatgctctggaaccctatctctgtctctaaggcactaggattatgtgtgcctgccaaccttttttatatgggttctaagaattgaacttgagaccttgtgcttgaaaggcactgaaccatctcactagccctgtggtttgcttcagtaagttaaagacctcaagctcactaccaccttgaactgctttataattttctagtcttacagaaattgtgaattttcctatcttctgacatctgtcaatattcttattcataggtaaattccaactgaattgaatattaatagtattactgttcattgacaagcttacaatagagtgaaacacaagtctaaagtaatgtaatattgacttaataatgactatattatataattttaaaaggtatttagcaaaattcatatccctttcatcaattgcttccttaaaatataaagcccaccactgaagaacaccaggaacatggtatagtgaaaaataaactttatttatttagcttattgtagaaagtattttcaccccctaaaagctgtgagcatgttgagaggagtcagaaagtctgcagaaggtataaaggagctgaagtcaggttagtagtctgctcaagggtggctcaattctcatttgaatggttttgctgttattctgcacaggctcccttgaagttgtagatcagtttttggactgggatactgagtgtctgtggccctcaaaaaacagtgcttgagcttgggtgacctggactgtacagtggtgtttgctttggttcagtttctctgcttgcaagtcagtggtttgtggcttctgttttctttctctgtctccacctctgatcattctttagttaaaccagggtatttaccacttaagggaggtaaaccaacgagattttaataggttgtaaatgcttatcaagccatttgtgatagatatgttgacctcaagcactggcctatttcctggatggtgatttgttctgccatctggttgacagaagcaacacagtggcattgagggatctggagatgacacactgggttatcccagacagaatttgtatttagtttgaaataatgttccatatatgtcataatcagtttggatcttcctttttatttgttcatctgcttgttttgtttagggaaaaatattacgcgtgtgtgctcatgatgtgtggggatgtttgcatggtgtgtgtgtgtatatgcatgggcacactcgggtgcatgacgtgtggggcatgcatgtgtatgtacatgtgtgcatgctttatgtatgcatgcatgggtgtgggacattcatgtggaagtcagaggacaactgtgtgaaggcggggctcttccaccttcaagtatattcctgagatagagctctggtcaccaagcaggaacatgaagctcctttacctgctgagacatcttaccagtccacaattgtttgcaatttgattttcattgtttacctttacaagtgtctgaatgataattctagtatttagtgatggtcaagggtaaaggtctttgtagtactaacaataaaggagggggtgggagcctcttgacattctagaatcttgacccatagggaagagaacaagatagacaagagatttactttttttgcttgctcagttatttttctctcaaactcttaaaaaagaaaaaaaaggttagacttatttcacatgtttcaacagtcagagagattcagaggaaagtgggtattgtctgagaaggaagcagttataggcaggcactcatcatgtactgctgctaggataataacagttgtcagattttaggtagacatttgccatctgggccagcaccaggagagtgtgtaaacacagttgttagacattgcaacactctagtgttaagttgactccaatgcttacagttgccgttgacttaatgtgctagagggtcttgtcttagacatgaagctgaaggctttgctttgggttttaatcatctgtgatgtgtgttgtgggttgctgtgctcactttgttttatgaatcatcgtgcagacaagttgtggtttctcttttaattttttgaaaaaaaaattgatgatttacattgtatgtgctttggtgttttgcctgcatatgtatggggtgtcaggtccctggagctgaggttacagatagtttcgaggtgctatgtgagttctgggaattgaacccatttcctctgaagagcagccagtggtcttaacctttgagccacctctccagcccttaaagatgtattttattttatgagtataagtattttgcctgaatggatgcacaatactcagtgcaccacatgcatgcctagtgcagtgggtcccctggagctagagctacagacagttgtgaggagccatgtgggtgctgggaattgaacccaggtcccctagggaagcagccaacactcttacccattgagttatctctccagcctctctcttttaattttaaaagacagccagtgtgagtttcttgtgtatttgtggggtaaggggttcatctcatggtagagctatacttcatgctcagtgtgacagaagagtgtctctgtaggctagcatgcctgtaaccttggattgtggaggcagagaaggaaaccaatgcaatgttaaaactagcttggtctgtgttctgagtttaggccatccagggctataatatcaggagactctactcaaaaaacagtcagaaaaacaaaccaccaccaaccgatcaaacaaaaccaaaccaaagaataagtatttgtaattattgaaaagctggaaaaagaacattttgacttgaaggattagtcaagggcctgtattagttttctctcctttttcagataggggtagacattactgggtattaaatttagggcttcacttatacccagcaagcactctacctctgacggccttttcacttccagtaaatggccatagtgccagcgaggctccagctctcacaggtgtacaccactcttggctacgggggaagcccctttacttccccttgaacctgggaagcttgagatgctcgaatggtctgagttggaagtggtgtggtgtggctaagatgcttgtccttggaactcagtcacatgaaaggccacctacaggtattctcatcagatgagactgccctgggctgtatgagctgggggggggggggggaggcgggaggatggtgggggagcagtcctgctgtgtcttctctgagctcatagtactgagtctatacatgagagaacctatacataattattgttttaagtcactatgttcagggtgacaaatcaaagattgtgggaaagaaatatacaaggagtttagcagagggtggtcatgctagcctcagctcttgggaagctaaaacaggattgtctagcgttatagagatgctgtctcaaaagcaacagcaacccaaggatgttggtagcaatattaacttataacaataagtaaaaattttaaatagtctacttaatagtaagaaaataaggggctggagagatggctcaacggttaagagcactgactgttcttccagaggtccctgagttcaattcccaggagccacatggtgactcgcaactatctgtcatgggatccgatgcacttttttggtgtgtgtctgaagatagctacagtgtactcatataaataataaataaataaatccttaaaaaataaagaaaataaataaactgatacatttttttccataaagaaaagatctgtcttcaaaagaaaacaatcagttctgttataaccaatgtcaaaatggtcccagtgtacacacatgtaaataaagatgattaagaacaacaacaacaacaaattgtaggcctggggaatatagctcatcaacagaggcttcctagagggaacaaggccttggatagagccccagcattaccaaaatccaaaacagtcagcaagtttaaaaaaaaaaaaaggaaggttccaggtgagctgatccataactgtaactgtgtaaatatcagtaccacagcgcttcagctggtctgtgagggaggacaccctcattatgtaacgtttaaaatcatggctttagatggcttaaaaccttcctctttagaccagtttgattttgaacaactagaagaagtgtacagattgagcacacagtattaaagctgccagcccctccctactgccttcagggcagtctctgggcttcttattttctctgtctctgtctcaggattttcttttttaaactttaaatgttgaaacttaatccccagccctcatgcatgctctgccagccctcttggatcatgctatacacttcatgaatcttaactgcttttatgatcttatagggacttaaaagattggttttcctaagaagcaccaacttgtcactgtaggcgcacagtaactaaaagctgaataaaacattggcatctgtgactttattttgtctgtctcttctgttatgttaaacttcaggtctgattcctgctcagctgtgcacatagacatattaattacttaaggagtgtccatctaaaaactgcttatataaaatttgttagccttaaatttgcctaacctctctgtaaaatacaagaacgaagacacgggaatctaaggtactttttttaagttccagaattttgtaggcagatcacacagtgatgttactactctgccaaggaggagcaattatcccatgaaggaaactaaggcagattccttatgcaaaagtaatctcttgatgagaattctatcaccctcctcaagcagtaaagactcttatgtagccagcaggaccttgcaggatcaaccaaaataatggtcaactcgaccattctagtcaaggttagctgtttatcagtcaggcaaacacaccagctgtgcaacaccatcccttctcctcatttctctaagactcagagttccttccagaaactcaaaagcagatcttaggttaccagacatttctgtacttcctagttcagccttgatctgtctcttcaattgactttggagacaggtggtcaaacctagtctattgtgaaccttcaggtcagggattgtgtcctaaactcctacaaaaaccttgcacttcagctttctatttaaatatagatcttttactacatcatcatcatcattttcttatgttaaaacacatctctcacttcaaaggaaataagagccaaatatgagtgaccatggtctttgctgtgacctgacatttgacaaatagcaactgaagaaggaatggtttgttttggctcctaggttgaggctgtagtatatcatggtaggaaagcaagagtggctccagctgctgtggccctgggtgccagcccacacgatcccctcactcttgaactttgcttagctgtaaaaccatcaccacgtggacagttgttctggcaactcaagataaagcttgggtctctcctgcagatatcgtagcctctgtgcccgttgtatctgaactgggaaacactttctctaggtggttgatttttgagtgtggaaccccttcagctgcattctttcttcaaccccttctttcaaaagattttctactttaataaactggggctattgagtccatttcctgttggcccagtacaaatggaaggttgttctttagtgatgctaatctcatacagtagagaaatagtcagggtaatagccccacttctcagtaccaattttcatatagtcagggttttatagaagaagcaaaccaataaatgtgcatatttctgttataaaaggagatgtattaggttgacacatgtaacagggcccagtggtggccatctgtatggtggagagccgagaacccactagttgctctgtccatgaagctagatgctttacacagtaccaatctggcactgaggcctggagcacccgagaagaggcagtgctaggaagctgaagtagcaaaagatgcccctgctgagaagtcacgagggaggccgcaggtgcacactacctttcccttggacccctttattctggatttcctgttggagcgtgcccactgactttgagaataggttttatcccctcagtaaagcccctctggaagcaccttcacagacatactgaaaggtctgtctttcttgggtgtttttaaagtcttcagattgccgagatgaataactctacactccaataacattacagcatgaaagaggttatgtggactttttatagttccaggaggatcaagatatggagccagccagtggtggcgcacgcctttaatcctagcacttgggaggcagaggcaggtggatttctgagttcgaggccagcctggtctacagagtgagttccaggacagccagggctatccagaaaaaccctgtctcgaaaaaaaaaataatgagttagcaggttacaacaaagttaataagtcttagatgctatatgaatgagattcttagctttggggttggtggaatctagcagcctgctaaattaattcatttcaaaggttttgcctcatagttgaaagttatgagaggtcaagcattgaagtggatattaatggcttcagggtcctatgttgtccagtttgaccttccactatctttgtgtctgaggatgaccttgagtgtctgttccagctgcctctacattccaggtgatgatgggattagaagtgggagccacccagcctgctttatgtgatactggggatcgaacccagggcttcttctattcaagggaagtactctaccaactgagctccttcttcagccagctgtttcacttagacagatgtatttgttgcgttcatttcttcatctattcattcagtggatgtgtgtggatgtagtcatgaatgtacagacaaccacataacttgaactgtgaccattttaaaattagaatgatcaattctgctacacagcttcttagactttttcacattctaagactgtgcagttatgattgcttattaggcttagtttattttaagaagtatgactgtgcttgttatcggtacatttaaatatttgaaattgttttctcttccttagctgtcccctttcctccaacccgacggctaactttgaaggaagtttttgagaatgggaaacctaaaatggatcttttgaaaaaccatttagtaaaagaaggtcgggtggaagaggaggtggccttaaagatcatcaatgatggggctgccatcctgaagcaggagaagaccatgatagaggtggaggctccgatcacaggtatgaaacacatgtgaatgaaacgcacacgtgtgggtgccagcccttaggtttgtgatagtttgagaaatgattaccaaaggccagctgaaatgagtgtgataaatatttctctaattttgaagcaatctagggattttgacttttgttgcttaaaaaacaacattagggtctgaaacttggtggataagagcacatcctgtcttgcagaagactggagtttggttccaagtgtccatattagatggttcagagccactgtaactcccagctgtagggagaataccacacctctggcctctatggacacttgtactcatgtacacacacccctctcccagacagatgcacacatacacacaaaattaaaaataaatctttttaaaaagaagcatactcttaactgcttcatattgataataggggcattgagttctgattgagtagctaaatatacagaagagcagtgaaaaggaaagtgattaaactgaagtcctgttgccctgatgcttcttcctaacgcacagtttccacctcatgtctttctcgcctagtgtgtggtgatgttcatggacaattctttgacctgatgaagttgtttgaagttgggggatcacctagtaatactcgctacctcttcctgggtgactatgtggacagaggctatttcagtatagaggtaaaattaacatggctgtactgcccctattgtatcatattctaaaagatctgctctccattccttagtagaaaagattaagatatgaatgctgatagaatttatccactttattacattcaactaatagagatatgctttttttctcaaaaaaatctatccttttaacctgtagaaaacctgtcatatgggaggctatattaagctaattttgaaaatagatatttgctaaggttttctccttaaagatagctgtctgggatatagggacatgcatagcttttcattctaaacagtgtctgagctaagtaccttaattataatactgcagccaacgcttaggttaacttcctgtgggaactaggcactgctggctgagctactgcaggagggactctggtcctgttgcacacggctggcattaatgtccactagaaggcaaaagatgaagtgaagccaataaaaactgacagtttacctttatgttttaagaattaaatgatggaacatgagtaggattaaaaacaggtatgtgcttttgtgggtgaacataaaatgattttagggcccaatacaaaggcttgaggaccatgtaattatagcacatctgcttcacaaataaaagatcctgtgtgaagaagtcttcataattaagtttgtaatatgccctagaaagaacaggaggtgacaaattctgtcgtgttttagtgctttaggctatgtgctcttcatagtgtggggatttcactgtattggctgctcctgctagagaaaggtctcctcctcttcctcctcttcttcctcctcttcctcctcctcctcttcttcctcctcttcctcctcctcttcttcttcctcctcttcctcctcctcttcttcttcttcctcctcttcctcctcctcttcttcttcctcctcgtagtcctcctcctcttccccttcctccttgtagtcttcctcctcttcttccttctcctcttcctcttcttcctccttctcttcctcttcttcctcctcttcctcctcctcttcttcctcctcttcttcttcctcctcctcctcttccccttcctccttgttgtcttcctcctcttcttcttccttctcctcttcctcttcttcctccttctcttcctcttcttcctcctcttcctcctcctcttcctcctcctcttcttcttcctcctcctcttcctcctcttccccttcctccttgttgtcttcctcctcttcttcttccttctcctcttcctcttcttcctccttctcttcctcttcttcctcttcttcctcctcctcctcttccttgtcctccttttccttctattgtttttaaatgtaactcaactgtctgactcagttttcaaagaagagtcagttctgaagaccccagaagaatgaacaacaacgtatgtttattttactcttcagttaagtagcagtatagggagctagggtgtaagtcactgccagagttcttgtctagcatgccaagccctgatgttaattcctggctctgaaaaaacattgtgtgtgtgtgtgtgtgtgtgtgtgtgtgtgtgtgtgtgtagggtaggcattctaaatcagaaaagttgagttttatctgttactaccccagactcattagtgtcagattgagaaggacacaggatactgctatagactatgacattttcctgctgagccttgtcctgctgctcatgctcacagtgagcacccggggatagcctctgggcagagactgggatgggtggaaggcatgtcttgagatgtgtcactgaagaccttgcctattgcagtcaggaattgactgcagggctgtgcacttcagtagatagtgctaatgggtgggtgtttaaaaggtagaagataaagaataaagagtgttttcaattatctattcattgttttacttaattaaatatatttttgttgttttgggcctcctcctcctccttcctccttcctcttcttcttcctccttctccttccttctcctccttccttctcctcctccttcttcctcctcttcctccttctttgtattattattattatttcttttgtttttaaagttgtatttatttatatgaatacactgtagctgtcttcagacacaccagaagaaggtatctcattacagatgattgtgagccaccatatggtggctgggaattgaactcagaacctctggaagagcagtcagtactctaactgctgagccatctctccagccctattattatccctttacatcctgaccacagtttcccctccttcctctccttccaatcccttcgtttttgtttttgtctaagtatttcatttggtttaggttagcctcagagttgctgtatatctgaggatgaccttagtaaacttccgatccttttgtgtccatgcttccatgatccttacatagtgctgaaaattgaacccaggattttgtgcatgctagggagatactccaccaaccgagctaattcctagccccagggacaatgtattaaacataaacattagtgctggagagatagctcagcagttaagaacacagcctgcttttgcataggacctgggttcaacccctagcacccatatcttcaaatggctcacaaccatctttaactcttgctccagatgattctggcctctgtgggcaaatggtctcatgtgcacacaagaacaaatgtacagaatcttaaaaaatacaatcttgaaacaaataggacaaaatattttctaattattatgacttacagttaattaaaaataagactttataaagttttaattttaattttgtttactttaagtgctagggattgtcccagtgcgaaatctaccactgagcactatccccaggctactgtttaattttggaagcaggtgtctttgtgttccccaagttggttagttgatctttctttccttacccttaccctcaccccaccccctctccatggtttttctctgtagcccagactggcctggaacttggttggtcatgaatttctgctccagtctcccaaatagctgaaactacagtcatatgccctcctctggctctagttcctggttttcaaatagtttcaattcattgatacagttactgactcatgttctaaaatccacagtgagttttgtacctctgtgctatttccaggaaatttcatgttacatggttttccctcctttattagtaatttcctgagtaacaactttatagcaggctgtagaatccaatctagaatgagattcagatagaggtaactcagcagtagaacccttgcctacaggtccatccccacttacacacaaaaagagtaaaattcgtgttctctggaggagctagcagtcctatagtacaggctctcctttcagcgggtcttctagtataatagaagtcttcctataatcagcagtaggaatcttcgtattaagacctttcccagggggctagtggatggctcagtgtagaaaagcatgtattgttcttgcccaggacccaagtctggttctcagcacacatattgaaaggaaataaaacttgagacatgtgattcatgtaatttatgtcaaatagcccaaagagttgtttgtgagctttgaaacctggggctgagaacatagcagaacaggccaggacatgcccgggcaggcccgtcgttacatgtcctgactggcctagtgcctacctatctcccacccttctgatagtctgttaatgtttaaatggaccaatcatgtaaaaccgcgccaattcctcccccagccccaccccttttctataaaagtccctagctcccaagcctcggggtcgaaaccactgtctcctgtgtgagatacgtttcgaaccggagctccgccattatggctccaccatgtggtcgacacctctgtctcctgcgggagatatgtgtcggcccggagctccatcattaaactacctcatgcttttacatcaagatggtcgtctgttcgtgattcctgggtgcgcgctgaacgacaattgagtgggggtttccccactaggttctttcaatatcaggcagctcacaactgcctataactctagctccaagggatccaaataagtctcctttgggcacttgccctcatgtgcacatacttaaaaacacaggcatatacatacacacataattaaaaataaatcttaaagacctcgccaagtcttctaatatatagtaggcattcagttttaatgaatactaatgtaatttaattgtagtttgcatttgactttgttattttttttacttgactgatttctctaaaatataacaaatgaattgaaggttttagataacagtggtggtctaattgttttctttttaagattttcacttatttttatgtggataaatgttttcctgaatgtattcaagtgcatgcctgctgtccaagaaggacagaagacagcaccagatccctggaactggagttacaggagcatgggaccctccatgtgtgggaaccaagttcaggctctctgcaagagcaataaatgcttctcactgctgagcggtctccagctaccactcctcccaggttttgagatagcatcttatttagccagacctgaagcttgctaactaaggctgaccttggactccttacgtgcctgtctccactcccaggtgctggctgacagcgtaagcataaaccaccacgtctaggttatgtttagcttttggatgcaatcatttttattattttcaagttttatttgtgtgggggggggagaaggaggggaagggaaggaactcgggagggagggagggaggggagggtccatttatgctttttgtatgcaaatgcttgtgggcagaagaggatcattcaatccattctcttggagctagattacaacagttttgagctgcagatgactgagttgggaagtaaactcaggtcctctgaagaacagcaagcactctgagcacctctccagcccctgtctttttctatttttcctctggtcccccacacaccatcgctacatactgtactcctgaactattcccttactctgactttttgttgttcttttaatttttttcttatatgtattttttaatactgtaagtcctttctagatttaatcatttattttatgggtatgggtgttttacctgcatgtatgtctgtgtaccatgtgtctgcacacagaggccagaagagggcgtcagatcccctgggacgggaactacctgtgattgtcagccaccacatggaacctgaatctgctcacctataagagaaggactgctaagctgtcctcatagcaccttgaatgcatttttaaaaagaaaattaggacaataatggatattccttctgtgattcttttccattcaacatcatattagaaacatttttatcattaatttttctatgatgacacattactggcaaaaagtccatggcttgctttaccattcctttagtgttgggtaaataggcttatagaaggttgctcactgcctttccccctcctccctcaggaacaaaacccctgttttgttccaaaaagtagggctctggtggcaaggggaactttcagactcaagaaaggaagccttttatcccaggccagggaataatttctgattgttctgaccttgttaaagtaaatcctgccacttgtgattagcctcaggatatcacaggctcattctgcctggtgatgcataagacagctctctggtgctattcttggtttttgtttgcttggctgccctatgggcagcttcctatgtgaaaagactcttgggaagaaaggtaaagctttgggctttgccttattttgttgatgcagaatctcacaaagtccaaactggccttgagttcattttatagccaagggtgagtctgaacacctacctttgtcttccccaggcagcgggtgcagcctaaagcttttggacatctattccaccctgtcagttaaatgtggatgggtgtcccaaggcagccattttatggctgtgaggactgtcctgtgagtcacagaggaatgagtagcaggagcgggcctggtttctgtgacagtgttgagaccatcactgaacatctgtgtctccacctcttatttaattagaatgctaattggctttgtggctgtgtcttagattttaacttttaaattatattttctgtgtgtgtgtttatatgcatgtctatagaagtcaaaggacaacttataggagccagttctctccactatgtgggtcctaagagttgaactcaggttgttgggctagcagtaaattccataacccactgagttatctctcaggcccagctaattagattttgtatcactatactgaaaatggcacaaacttattttccattttttgctctgtacattgcagaagttagtgtcttgtagaatattccttgaatttacaaagatatattactgtatggggtggagtgggtgggtgtgtatgctacagtgctcaaaggacacctttgtggagtttgttgtgactttccacctttatgtgagtactctgattgaactaaggctcacaaagcaagccctttacctactggtcatcttatccggatacatcgttgatggcatgacagactttagatcatagtcttaaatgtaagttcttgattttctactgagaattttgtatgctagtttctatataatttgtttaccatctatgaatttgaaatcagtagggataaagggagataggaacaactaatttagatggatcactcagggcaggcctttcagagatgaggatatttgggtagaaacgggaatgaccttcaagagaaagcacagctgagtgggagtcccttgtgcgcagagggcacagagaatgaaagctcagtgacagggacagcccagacagtagcaaggctgggcgggcggggtggggaggaagagctgctgcaggcagacagacagactgacagataggcagaccttgcaaaccatagtcagggagtttagatttgttctgggtgtgatatgaagcacctgcgttgttattttaattgctattttttctgatgtgggaggctttgggaggagcagcgctgccatatttgtgtcttacaacaattactctgactgttatgtaacctgggactgctggagcctaaagacaggcacagaaaccccacttaggaagattatctaataatgcttgagaccaggtgtgcttctccagaggttttcaagtattgaaggatttgcatagattttgccagtggagcatgcctgtccaaaagtaaaatcttcgaaatgctccagaggcaaatcttttggagtatcacagtggcattcactgaggttcagattctgcagtatctcagattttggaatttggtaatcagtctgtgatatggataagagataccagtaacaaattaggatggacagatggagagacagacagatacacatacacagacacatacagatacgcagtatctctcctcctcctcctcctcagataaatgaaggagagtacccaccttatctgcactcaagggttttcacccttccggtctcctctttagtgtcaggcttattaaactttcccatgtttcttaactagataagcatgcatttcgtatactcctgactttataaagggcaacatcccatactcttttctatactcaaaatgactctgaaacagtttacatagttctttctcattcccttgctatagtgtcatggcgttgcttagcatgtgtgtgtgtgtgtgtgtgtgtgtgtgtatgtgtgtgtacacatgtgttcattgtcagtattttactatgataatgttgagaacttttgcattgtctttaccatgcaatttacgtcttgtcttgtcttttgacaaggtttctctgtgtagccctggctgtcctggaacttactctgtagagcagtctggtcttgaactcagagatcctaagtgctgagatcaaaggcatgcataccacccagcttttttttttttttagatttgttttatgtatgcgagtattgaccaacatgtatgtatgtagcccatgtatgtgcctggtagcccagaggtcagaagagggcatcaggtaccccagaattggggctaatagatgtttgtaaatcaccatgtgggtgggtgctgggaactaagcccaggtcctctggaagagcaatgagtgctctctcttactgctgagccatctctccagccccagtgctccttcattcttacatgatagaaacatgtctgtctggatctctagtcaatgaaatttcttccctacagcccatgcattcttgttaaacttcattttaacctgtggacccctcattcgtttgtcacttgttgggtactatgtaagattagatctaagtttactatttttttgaaatggcatctaaccccagagctgtttcattaaaaagctcattaccccagggatctcctccaccctgtttttatgagatgaatttttatactgtagtgcaggcaagtctccaattcaaggcagttctgctctagcctactcggtgctggggttccaggatgagctgccatgcacagctgttacctggtgattagagatgccgcctttattgtgtacagatgttcatatgaacttggatctgtttctggactactggaagattgaggcatgtggcagggcacaaggattttattttattttattttatttgaactgaagttttattatataaccaggttagtatagaaagtagtctaagctagccttgaattcattgctctttttgcctgagtacaggggtgacaggcctatgctacttcatctgactcaggacattatgtttttgtttctgtatttggttttggtgttgttgttggtggtggtgttttgtttttttgttttttgttttggatacaatatgtcatgtgaccttgaactactggttcctcactgattcttctgcttccatctcttaagggctagtattatgggtatgggacattatgtatgtttatgggtcctaggatcaaactcaggaccttgtgcacggtaatcaggcactctaccaactgagctgcaacccccagctttttgttgctgctgttgtaaatattattcgtgggggtgggggtggttattctatttagaccatatagttctcaaagacacaaaaacctttagttttaaaataagccttaaagcactagagctgggcagatatcagccctctatgctcttttgtctactcccctgtcaataaccctgagatatcacttgtgtgttgtgcctgggctgctcctgttctaacaggctggccctcatggctgtgctctcaccattcatctcccccacagcgacttctgccttctccccctcctccttgttgtggtccctgcctgagccttctatctgccctgcccctctcttttgtacagcccaggctgtaggcatctttattaaccaatcagagataacttggaagcaagttttatacaactaaagctggcatatgtaaggatctgttcttctcagagcagtgagatcttggggtatagagtttagcatttgaatatcagcctcaccagaacaactgccatacatgtttatttatgtattcaattgtatatcctatcttgctgaattctttcactaagctactttttatcattgatttttcaggggtgttttttagttatacaattatattgtcagcttttaatttttcctttacccattctacctcaatatttagatacttagaggttttttgttttgttttggatacttagcagattttaaagaaggttattaattttaccaaatttaaggataacatgcaaaagctcgaagattacatttacaacttgggacttacagtgagatataccatatagcacatcatttagatttagatcaaatgtgtttatgtattgtcatggtcatgaagaacacttatcctctaattgtgtctcctagtgtgtgctgtatctatggagcttaaagattaaccatcctaaaacattgtttctgcttcgaggaaatcatgaatgcaggcatcttacagagtacttcaccttcaaacaggaatgtgagtatacatctctccagaacagtcagttatctcaggtgctgccacactcagttaagatcataccttcaaaatgaaaaactcaagccaggcttggtggctcttgcctgtagctcagcgctcgggaagctgaggcagaaggatcaccacaactttgaagccagcttgggctatagagtcagacactgtttaaaagaagatggagaagaaaagttcaatgcttttacattgcttatcagagaatgagtttgtttagcacacacactccactatactcacatggtagtctccatttgacaaggttataattgagtcgcttcactagacaggttataatagctgccttcttcccagtatagcttgaaaggaaaggtcagaattattaaagaaaattgtaatccaggcttgatagacatatctgtaatcccagcacttgagaggtggagacaaaaggattaggaattcaaagccagccttggctatgtggtgaattcaaggtcagtttgagctatatgaaaccctgtctcaaaaaaacaacaaaagagacaggatcttcagatcattccagccccagaaacttcctgaaataaacacaccatcagataataaccaggaagggtttcaaagtagatttactcttggtagggatttaaattggtgtcaagtatttggacagcaattttgaaatatttgtgaagattggttttgtatttgtgaagtatacattctcttctctcagtattttgactgctaaagcaactgtcaggagtttagtgactcccacagggctcatgtcacagcagaagtcaggattctctgtaggctttgctcagcagggaccatggtatgtgaggactgtattagaatcttcctctgaggctagtagtcgtttagagtccttgcaatgatggattaaagtcctttcttctagctcccaaactgggggtgaacggtgggggatgtcactctcactctcagtttttaaagattgctttcaagtttttgacatggttcccaaaggtagttcccagtgttgacgttggctttcttctggccctgcctggatgagtctctgacttctgcagtcagagctggaggaaccctgtgctctttaatggttggtgtgatcaggccaggttcatccagaagactcttccctttccgtccggtgaagtgtaacagtgagaggctcatcgtagtcagagtcccacggacttgaaagctatacagagtggaagccattggaagtcatgttacaatttgtctagcacagatggacagaaaacagtagatatttgcttcttaaggatgctcattgcagtgttaattataacaacaaaaaaaattagatgtcaataaagggccaattaagtacaatatatgagtatcagaaaggggtgtcggaatacagagttaggaaactttatggagtccagtctttgcttcacctcatttatgtggatttccaaggtcgatctcaggtctgcaggcttacacagcaagtgctttacctgctgagtcatcttcctggcccccaaaataacctttatagcaatactagaccactgtttaaatattaagggatctgtgtgtgctatatggagagatgcttagatgtgctattagctgagaaaaaccattggctgacttgcacattgtgcacagaagtcattggcactagtgttacttcttgtgctgggtcagaggatcttattttaatgcttaaaatatttgaattactttttgccactattttgaactacttctgtaatttttttcaagctgctaacttaaaaacaatgcaattgcaaaccaagtatttaaatggcttttatttgttttcttttttcttcttttcttttcttcctttcttcctttcttcctttctttctttttttttttttttgtgacagtgtttctctgtaaaacatggctatcctagaactcaagctgtagatcaggctggcctcaacctcagatatctgcctgcctctgcctctgcctcctgagtgctgggattaaaggtgtgtgcccccactgcctggcttaaaaaataaataaataaataaataaataaataaataaataaataaatacaggggctacacaggaggaaaccctgtctcaaaaaacctaaataaataaataaataaataaataaataaataaataaataaataaataaatacagggctacacaggaggaaaccctgtctcaaaaaaccaaaatagatagatagatagatagatagatagatagatagatagatagatagatagataggactgcaggactagtgagatgctgaacacttgctactgagtttgacgatctgagcagttcccaggaagcaaagatctgattcctgcacattgttgtctgccttccacatttgtgacattatatgtgtgtgagcgtggacacacaaggtatgaaagaaaagcataactgtgccagtgtccctgagaactcccaactccttgactatttgaagattttaaagtactttgcagtttctctaacatatactggttttgcctaaaaaattacataatatatataaaacaggcaacaacggacctgggatctgctggatggaagtcagctacttgcacttagagttaagtgagcagcaaggacatggcctgcaggtgccttgctcttcgtgaggtggctgtgctggtttccatttgacagagggttttctgcattgccctggctatgcacagctcattggtttaggctccttgtttggcttggtttttaagggacatttactgtaatttcccgccctgttctccccttttaagccacaatttttatttgttcttttatgggtttggtgctggagagtgaagcagattttgtttgtgatcagtataattggtcctgagtatttttagaagatagaacaatagactcaggaaatgcttttaagttttttattttgcccagaattcctcacctcatgtctcttgtctgctggcgctcagtgtgctcctagctgtactccagcctagtcactccgtctgctgacatactaatgtacacatataaaatgttattcctatatgaggaaagagcacgtatgtgtgttcactgacaggctgatctcgtctgtgggccactgtggcttttagaatcagaaccatataattactgctaagtgatgctcggtggcagaatgtgcagctgcgggcttttaaggagtgtggttttcttgtctcatatcagttttatttatttatttatttttgaaacagttctatttttactttttgctttaagaaagagtctgagttccccaggttggccttgaatttttgggcctcctcttagctcctacatagctgggatcacaggctgatgtcaccagggtcaccaggcctgtatcacatttattcttacttatactgagagacttatttttcaatttctcttgttttctctaaagcacaagaaaatttgagggctggagagatggctcagtgggcactgactgctcttccaaaggtcctgagttcaaatcccagcaaccacatgatggctcacaaccacccgtaatgagatctgatcccctcttctggtgtatctgaagacagctacagtgtgcttacatataataaataaataaatctttaaaaaaaagaaaatttgaataacaaacaaacaaaaaaagaataactgatatcttttgggaggtgtttttaagacaggggcttgttagactacccaggatggccttgaactacctcagtacctactgctggcctcaaacaattagtgggccttctgcttcatccttctgaaattacaggcatgtgttacagagcctggctaatagttaactatctgcctactgtttcttattgttgtgtacttagaaagcaagaagtgtagcgagtgtcttgaccccgtctcatagttttgggtccagatatctcaagaggattagtttgttgttccccaaacctctttttgatagcttactgacaagttccagaaacttttgtaattttctaaaggacacagcactgttctaaagaagaatactgttcgtcacagtatttggagtagcagattggtgtggttagattatggcatatccataagtctagagctgtataatttgttttctttttaactaccaagctgttatcataagaaagacagaattttatcttatccctggggatttctcagctaggctaaagaaattggtttgctaatggcctgtaccattagtccccagcacaggtgacagtggaccctggggacttggggccagagagagaggagagacaaagacagagggggaatctttagtgaatgcaaatgagaattaagaaaatatatgctcaatagctaggttatggtttcttatacatgatgctgacactcaaaacttcctggaattcttttacaattttgttttattgctggccatgggtggggtgatgtttgcctgtaatcccagtacttaggagatgagttaagatcagattggactatatgaaaccttttaactacagtttgttccatcctgttgtattattggcaagagttaaaccttatataaatgtctataatatagacattaatttttcatgaaaataaagctctttaatcagcttatttgaccttttggaatgatatattttagtatttaaattctatttaatttaaacttaaaaatagtggtgggcatagtggcacattgccagtaatcccagcattctagaagctgccagttcaaggccagcctgagcttcatagtaagatcccatgttgacagttcacagaatgagggtataaacatttgggagagcacttgccctgcattctcaaggccttgggtcccaaccccagcaccatagtttggaagagtctgagagggtagttaagaatgtggatgtgacttctctgccactgaagcttgcagttatgagcactgcgcccagttttctccccttttatgtaattgtgtgttatatttatatgtatgcttatgtgtgtgtctgtgcctgctgctctcagagaccaaacaagggcatctaatatcctggaactggagttgcataccattgtgattcaccatgtgggtgggtgctgggaactaaacccaggtcctctggaagagcaatgagtgctctctcttactgctgagccatctctctagccccagtgctccttcaatcttacatggtagaaacatgtctgtctggaactcagtcatggaaatttcttccctattgtgtgggttttgaggattgaaccctggctctatggtagagcagacagtgctctaacagctgaatcacctctccagttgccttcctcagtttttaaatgaacatgggaatgtgcctacttcatagagattctgcgaaatgatcacttaacacatagttataaccattgtgtgccaggtgtaaatacacctctatcctcatagcatcatgacttatagggattatcattcccattatatagtcgggaaaacacatggaatggaagcatttgctcaagattccaagctagaaagctaacaaccaatctaaggaccaaactaagagagttaggttacaggtcatttatctgacaactgactggctcaggcatttagctcacggatatatactgtggtcactatacatgtaagtgtacttgctatatacttatagacatgtactcatcagagaacattagaaaaaataggactggccaggtgtggtggcacacgcctttaatcccagcacttgggaggcagaggcaggcggatttctgagttcgaggacagtctggtctacaaagtgagttccaggacagccagggctacacagagaaactgtctcgaaccctgtcccccccccaaaaaaaaaaaaagaaaaaagaaagaaaaaaagaaaaaataggactatggttactgtctctagtctaatccctcggggaatggtagcataggacggcctgtttgcgcacatactaatatgccgtacatgtcttttcacctgatttggcttttgttctcctgttttggtttacagagtggctcggtactctgtgcatacttgctgtctctccacagatctggcattgtttggaagtaagctaaggactttttctgagtcattattaggatgaaaggcatactagatgatggtgtggaccatgaatgccacttagactcttacctatactcaagtttaggattcttataaaggaattttaattgacattggtaacaaaggtgattctgcctttggatttttaggaggaaatatctagcactgaccacatgttaaagattctttgtttgcttttattttgaacagatgttatactcacagctggatctgcttttgaaatagcaaagtgaggctgtaactgtaaggaggtgcatccctgcacaaactgagctcatgttaaagttagatatgctattgaatacagtcttaaccgcctctgtgccagtgtgaagagagccctcagattccattaaacccaaacctgagtccctcagtatcagccacaaagagaatgtctggattgttatgagagggaggccttctcaccttcgtttatactttcctttgttttgtttgtttgtgtgttcgagatggggtttctctgtgtagccatagctatcctggaactcactttgtaaaccaggctggcctctaattcacaaagattcatttgctcctgagtgctgggattaaaggtgtgtgccaccatgcctggctccagtttacagtttcctatatggactgtagggtttccttatgtatactgtcttagtcttctctactagcattcactctaaaggcacagcttgactttaaatccaaggtcaactgtataatctgtttgttactactctaacaaaagacctgaagctgtgaaccttataaagaaaagagctttgtttagcttatagttttggaggtttcagggtatgataccagcattggttttgaattgatgaggacttcatgttgggagaacacattaaagagagagagaacacacaaggccaaagattagagaagagccctactggaagaactactgagtgtctcacatcttccttctgagggcagtgcccccagtgacttcccactaggctccacctgttcaggtttctcttcttaaaggtttaccctgtgtggtaacatcccacactgaaacccacacatcccttgagagatacattctagtcatagccacaccataacaccaagaaggaaaatgctggttttttttttttttaagcccatctttagagttcttacctgttacttcatgtctttttcttcctagagaattgtggcacacctacaatctgcccacttaggagtatttccttgtaccatagttccaacttgacaaccacatcaaaatataaaatgcaggaactcgagagatgtctcagaggataagagccctggattccctagaacagaatttaaggagaattgtaagctgccatatttgggtacagctaggtaaagcttccagcacccacataacaacaggtagctcccaagtgcctgtcatccaggtccagggtctactgctgcttctgagggcacctgcacagtgcacataacttaggtagacatacacaaataaaaaataaattcagaaatgcaaaacagtctatgtctatgtaaagtacactagagtagtaataattttcctacacattttttaatgtaagggctggagagatgaagctcttagtggctaagagctgctcttcaagagaggacccagatggcagctcacatctctcctgaactccagttccaggggatccagcactcttctggctacctccccaggcatgtgctcagtgcatgaacacacacacaggcaaactactcatacacgtaaaaataatcttttttaaaaacagaaaaaaatgagcccaaaggtttctgatacagaaatagttttcagtactgtggagacagttccacatggggtggggctgggatctactttgcctgggaagccccagggatcagcaatgccagcattgtttgtaaacgcttaatggcagaatttgaggatcctaaaaggaccctcaggagcctaaagccgtaaccttcctccaggtaaatgatgctcactaataagacatgggcagccacctgccttatcagatttcctgggcaacagagctagaaagttaatctaaggtcatacttatctttagaaagggaagagtgttcggttagcccttgtgtgcaactctaaaaggacattttctctgggacagggtcttcagacttgcctgtaaccagtggcttccgagctggcttcacctggttagtctcttcagtatggcactgttcatcccctgactttgtcctctttgggtaggtcggatcaagtattcagagatggtgtacgatgcgtgcatgcacactttcgactgtcttcctcttgctgccctcttaaaccagcagtttctctgtgtacatggaggaatgtctcctgaaattacttgtttagaggacattaggaaagtaagtaactttttactattttcatagagtgtgcttttaaatttttgttctttatcttagccagtgactacctatataacatatagcaattgctgaggttaaatgaaaatacagtcagaggtagaaatacgggactgactcataatcttgtcactgtcagagagctgttagtaacacttggagaaacattctttctctttttaaaaattaaagttttgtttcgttttttgaaacagggtttctttctataattctcgctggaattcactctgtagatcaggctggccttgaactctcagagatctacctacttctgcctctgagtgctaggattaaaagtatgcgccaccactgcttggccttaaaattaaatcttaatagctaaaagcatactcttcttacagtagaactctgaaactttaaaaatcatatttgtatattttaaacaaggtctctctgcaaagcccagactagccttgaactcaagacagttctacctcctccactgtatggtataattacaggacttgtgccaccatgcccagctttaaaaaattaaattatattccagcttgcaaagaaagaacatgaatgtgaagccttggccaggccccttacccttggagtacattctttctgtaaatgaggaaatttgactgagtgccctgagctctggcagctgtgaggcgcactgccgtttgcatcctaaacaggatggttggttgctccatgtgccttacactcccttatgtggtagttattcccaagactgtgtcttcatgactgagggaaaggagcagccttgtgcacgtgcacttccgcaccttgatcccctcagttcccacggggcacagactcaggatttccttgagttcacagcagtctcccagtgagcagtgagccggtgtgtgtgtgctggcttttcagtacccacccagcatgtcgcctttagtagattttgtatttaaccactgtgatcagctgtggtaaaaagctcccctctcactcagcagaagccctcttcttgactctcagatgttctggtgtgttcaaaaacaattatttatattctttgatttttttgtgggggtgtttttaattaaagcagcagtaactgaaaaagtaagttaatgacaaatattaaaagtaagttaatgacaccactgcatagaatggaaagaataaaaggctttttacaaaagaagacatctctattagaacgaagtgagcagtggacaggatgcctgcctggctccccgccctcctgtagctctgcttcccatagaaaatagaatttaactttagtcgtcacaattttttgtggaggctgatttcacatttgaggtaaatttcactagattagcatgggaggagaggcccttttctacaggaacagagataagatacttgtacacatttattgacgaattctcattttctcaagggaccatccttggggctcacggcctcatctgcaatactttcctgtagggagaaggggacttttaatctgctgcttccaaaagccttttactttcctgatttttttttctcttcttttggcccttgtgtgtcttctagttagataggttttctgagcctcctgcttttgggccagtgtgtgacctgctgtggtctgatcccttagaggactacggcagcgagaagaccctggagcactatacccacaacactgtccgaggctgctcctacttcttcaggtaagctgagaacacagtgaaacaaactgggccccattttactttttcagtttttctttaattacatatgtgtctatacacatgaatgcaggtccaagagagagactagagacataagatcccctgcagctggaaatataggcagttgtgaaccacccagtgtgggtgctgggaacttaggtcttctataagaagagcacatactcttaaccacagaggcatctttctagcccactgtgatccatataatggaattattcttttctaaattaatttttttttctttatgaatgttgtatctgcatgtctgtccgtctatgtactaagtgtgtgcctggcgccctctgaagttagaggagggtattatatccactagaactagaattctggaatcaccatgtgggtgctaagaactgaacttgggtcctcaataagagtggtaagtgttcttaaccaccgcgccatctctcaagccctagttttatgaaattaatcttgccaccacacctggtattatgaaagttttcttaatggctcaggtctcaaacaagaagtagagactactgtttagtctcattctctgtgttcttatttctcttttttctctgtcccctctctcacctccttctcctcttcctttcattttggtgttggagagcaaacccaggaccttacacatcctgggcaagcacttgttcaatcccttaatagcaggaaagctttaatatgttcttagacatgagatcataagaagtacagattagtgaacacagttaaaacctctcccagtatctcactgttataagctctaaatgatttattatttgtttctagatatcatctagatacttcctaacgatctgacttttaaaagattttatttctttattttattatttctatattttatagctgtcttcagacacaccagaagagagcattggatcctattacagatggttgtgagccaccatgtggttgctgggaattgaactcaggacctctggaagagcagtcagtgctcttaaccactgagccatctctccagcctcttatttttatgtgtgtcggtgctttgcctgtctgtgtgtgtgtaaactacatgtgtacctggtgcttgtggagaccagaagtaggcatcggatcccttggatctggtagttacagatgattatgagccatctgggacggggaggggtgggggctgcaaacgaaacctgggtgggtcttctgcaagaacaggaagtgctctttagcactgagcatgtctcctccccctccctctctctttccctctccctccccccctcttttttttctctctctctttctctctctctatgtatgtatgtatgtatgtatgtatgtatgtatgtatgtatgtacgtacatacgtacgtacgtacgtacataatcccagtatttgagaacaggcaggctgcacaatgtgagtccaaggccagcttcatctacatagtgggtgccaagccagccaggcctacgctcttagggttactgttactgtgacaaaacactatgaccaaaaagcaagtttttttggggggggggcagggagggttcatttggcttatcagatcacaatccatcattggagtaagtcaagacaggaactgaactagggctggaacctggaggcagctgatggagagaccatggagggtgctgcttactggcttgctcccagcttttggaacttctgctattgaccaaaacaaaccaaaaccaaaaccccagaacactgatccaagcctaggacttttcctggaagttattgtcctaaagttcacatgtgagctcttggtatggtttgccaagcctaaataaataaataaataaagtagagaaaataaagacattgaaatctaaactaattttaattccactgttttattatgacaaatttagttctttaaaaatcttgctaactggttaagataatacagtaattaaatgatacatatgtataaaagaagccttaatttgcccctaaacatttttaaaataatcgttttgaattctactctgccatctatctttctagtgacttatttactgaaacaatttaacttttccctcttatgatgttgcttaaggacttagcattattggccaaatgtcatttgttacagttcctgtggtcacctgccaacacctcttacaacacaggccttccacccagaaattctcctcctaacacttggcttgcagctatccccatactcacctgagttccctgcatcccagtccgtcctcacagagctcttatagcattggtggacacacttggcagaacaacagatgcacctgagccagcccatacggcgcaggcttacagctgacattagaagtcatgcgctgactcttgtttttagtctttttttctcttttgttttacgtgtaggagtgttttgctcacatgtatgtttctgtaccacatgtcttcctggtatccatgggggccagaacccctagaactggaattacagatgtgggtgctaagaaccaaacccagatcttctccaagagcagctcttaatcactgagccatctctccacccccacctcacagttttgtttctgtttctgcacttttctgtcagcagtctttttcagtgttgataatggtatcacacaaagtgctgtccagtgtccgtgagcaaagcagactgtagtgtaacttacagagatttgtcaagtgtgagttgtgttcctggccatgagttcaatgttaatgattcaatcttatatttacataaaatatcattatgcaagaaaacatcggaaacacttaagtggttgatgaaaatatggccagaggctcctaggaatcttaaacctcatacggaacctaggaacaatgtctcatggcatgaatccttggccgtgggctctaccagaattccacagcctcctacctcattcctaaggccttctcaaaactgcttcacagtctatgaatggctaacagaccattcattgttcctatgccagtcaagagggggacttcctgttccgaaattgtgataatgtcatatataggtgatcttaaaattatacattttccactgagcatagtaaaaagaaaattgccccctttttctcagacaggatcccgtgcatcccaggctggtctcaaacttactatgtaggaaaagacagccttgaacttctgcttcttctgtctcacctcccaagtactggggttacatgcgcagcatccctaaaatatggtgtataggggttggaccccggaatttgtatgctgcacaagcagtagaccagcttagttatatcccaattcaagaaagaaatactttctaaaagataagtaagtaacagctacaaattctgatggtaattttatatcctagttcttcctggttgtcaaacagaagttcaaaaaaaaaaagaccattttaggagtatatgcagatatcattagagtatggtggtctataatatttatatctactcctgagatagccatgcatagtactatcttgctattgatattacatataaagttataagtagattcttttaatttttctaaaggtttgatgatttaagaaaagcatgcactaattttgtaggacctactgtatacacatacatgcatacatggagttgtgatacatcttcgtatcaaaataccaacatttttgatcctaatactagtagtgttaaggtaaaataaattaaaagatggagaaactttctattctaaggtgtcttcttcaagtttgatagtagtgtgaaatagaaatcactggtttctgagcttttttttttttttttttaatcgaaattgaatataatatactcgacagacagacatagagtgtttttcctctgggctggaggagttactcattagacctgcttcctgtcctctcaaggattctcggagaggcctgggtttaagacgctctgaggagggaggttgtgagggaggagctggtttctgagcttttaataaaagttcagtcgtagggctggagagatggttccgtggttgagagcactggctgtttttccagaaggcctgggtggaggcacaatgttattgtgcagtgtttgaagattatccatgtatttttcaagtgctgatttctctgcctccacgtctggttgcaatcctgacatggcattgtaatacttactttaagactctcctcctgcctctgtgatgtgatgctccttattgattctctggtctgtcaataaaagctgatcagccaatgattgggcagaggagggaatggggctggacttccgatgccagccaggggggagggtcgggggaggggagaaagggcgatgggaagtgggattcactcagaggagagggagggtggaggggaccttgagaacacacctggagctgagcgacccagagcagtgctaaaatacaaggatcttgggggttcgggctgggagggagccagaatattttagaggattaaaacagattaatattgaccagctattgtggtgtaaagcttgattaaacaagacttacagtatcatctcattgatttggaagctagtcagggtaaagaaaaaaattatcactctgatggctctaacacctaggttcagttcccagcgctcatggtggttcgtaattgtctgtaactccagagtcatgggatctgccaccctcctttggcctctgtgggaactagaccctcagatggtgcatatccatacaagtaggcaaaagcctcatagaataaagtaaatctttaaaattgcagagtccatagtctctgtaatcttaaaacaactctcagattgggtgttctgtttcttcctattaaaacataactgctataattccatatttaggtttttctcattttctttttcagttaccctgcagtttgtgaatttttacagaacaacagtttattatcaataatcagagcccatgaagcccaggatgcggggtaggttgcacttagacctcaccttcctgcagattttacttttagtgtaaaaatgcctgagttcatatctcctttttcaggtaccgaatgtataggaagaaccaagcaactggctttccgtcacttattacgattttctctgcccctaattacctagatgtctataacaataaaggtaaagaagtccagcaatatcttagtgtgaattgttagtaactgtgagctctactttaattttgtgttttattttattattgtgttcatttgcttatttttattttttggctctgtggatggaacccaggtccttgtgtttgtgaagcaggcactctacccctgagctatatcctggacacctatttttaagtacaaaattcagtcagataagaaggtcttgggtaaggggtgaggctttgtagtaaagcatgtgtttagcatggggaaggccttagcgacactctctggtatcttactctgctctgcaccagctccccaagaatctgacatctctacctctctctccccaactcctcttctgatttgttctgttttgagacaaggttttgctatgtaatgcagactggctttgaacttggggtcctcgtgcttcatctcccaagtgttagggttacaggtatgcactcccattcctagatgaagaagagatcttattgggaaaaaaaggtcagtaagtttagaatgtaagctgctgcttgtccttcatctcctgagagattaggctctttgggagcatatttgtttagtattttaaaatgggatctcactgtacaacccagaccagcttcaaactcccaccctactttggcctccctagtgctgggattaaacatccaccatcatacctggctctccattaggtgggtggttggttggtttggagacagggtttctctgtgtagccctggctgtcctggaactcactctgtaggccaggctggcctaaatttgaagattcacctgcctctgcctcctaagtgctggggttaaaggtgtgagccaccactgccccagttttgtttcatttaaatctgagactgagagctggagagatggccctgtgttttaagagcactggctgctctttttacaggacctaggagaagtttcaggggacccaacaccatcacacagacatgcatgcaagcaaaacaacaatatgcataaaattaaaaataagttgttttttaaaaatctgagactatccttcagtggtttttctttctcttttaatcttgtgctctgttaggacctagagccttactcttgttaggaggtattgggcgctgagttccactcccagccctgatcactcactccataaaaacagatcctccctcccctagccttagctttatcagctttatcaactgctccaggctgtcctctactcctgactgtccaactgggctctgcaccacctttactgtgttctcatttcttttccctagatttcatgggtattagcagcttgggtttttttttttttttttctagtttcctttcttatcaagtatacatactttgttttaagcatcctcaaggatagttgtgcccctatgcctcgttttgtgaggcactctcttccttctccctttttagcaccactgttgagatcatctgtggaaagccttggggctcccagtgtgcttagctgagacctgcactcacatacgcacttgctaataccttaccaagaaatacctttattttattttgttttatacatattttttgagacagagtttctctatgctgctctggctgtcctggaaattactatgtagaccaggctggcctcagactcacagaaagctgctgctgctaacttccaagtgctgggattagagacatatgtactaccacccaacagtttacaaatgcctctttagttctgagaagaactctcgcaccttcttcctcctatggctgcttttcctgtcatttgttttcttatttttttgagacctaggccagatgacctttgaatttgctttgttgtctacaatggccatgaaattctaatcctcctgcctccattccagaatactggaattacaggcatgtgccatgtctgacatctgtggtgccaagcctcatgcatgttaggcatcgctcttcacgctgagcatctttggagagatctttaggctcattggtacccaggctgtatctttgttccctgatgacctaaaacatccttaaattggggtttttattcttatttctgtctccccaccccctatcccctgggaacatactccaaaaatttcttaagcttccatttttaatcatccactgttgagactaacttctttttcctgtgacagaattactgatatattcatgtcagctatataaaatgcacacagcatgaaaataatggaagtgtacatgtcaggtaaagttaggctttcaacaactggaaatcctgtttgtgtgtgctttatagtagtctgccatattcattttagaccattagtaacttaaagtttagaacactagtctatcccacagcaaggaaacaggaacccaatgtgaccttggtctgtcatttttaaagaattgtgtttcatgtctcagtaagaataattgaaagaaagccaggtgtagtggcacatacctttataatcccagaacttgggaggcaggaggcaagtggattgcttaaattgaagaccagtcagggaattcctgacagctagagctcttgggtggtggtaagagaagagaagaaaagagaagagaagagaaagagagagagtgtgtgtaaaaacaaaccaacaaaaaaccctaaccaaacaaaaaagaataattgaataaatagtacaaataacaacaaacgagacagaataaggaatttttaaaaaatataaagaagccttttccccagccccctcagcagttggttaggggctgcccctcacctaaggcaggaaggtggtggctgcaaagacacaaaagtttctagccagatgacacaggtctctgattccagcactcaggaggcagaggcagaggcaggaggatctctgtgaatttgaggccatcctggtctacagagcaagttccaggatatccaggagtacacagtgaaaccctgtctcacccacagtcacaggtctctggtgtttgtcaactctgggctcctgtttgttataaaaagtggaaagtacacgctgaggtacagactctgaagatgatcagacagagccaagcaaaattggttatcttcaataaaaactgcccagcttgagaaaatctgaaatagaatactatgccatgttggccaaaactggtgcccatcacaaaagtggcaataatattgaattgggcacagcgtgcagaaaatactacagagatgcatgctgggtattattgaccctggtgatgctgatattatctgaggtaccagaacagattgatgaacaatgaacaaggaaagctttgccagagctcatttaaaagaaagtatacagaaaatcagtaggtatgcatctatgtgacatggttactgtcagctgtttatagacactcagaatgctgagaatagaagacacttttttaattgattgagattctacattctacccttaaacattaattataaattattttgccatttattgcactgtgagttgataacatcttggagtgtttataaaaagctctagctgtggctcatgacttgcaaaggagtctccgtctgttcgatgggtaatagtgctatttgcccttagaaattgtgactgttaactggccagtaaatggaaattatagggagttttctatgttgaatctgaagtttcttcagtagctagtgcacagtaaacccttggtttttcaaagagcagtgtcttctgtgttttgatgatgtgaattccccaggtgtctttgttcccggtgataattaatccccaagagaatgaaccctttaaaattctttaaacttgtcaggctgtcctgaatttacaaatggaaaataagtcattgaaaagtcactgtagtaggctcacagggacaaagcacaaagctgctatgctggggttctctgtgcacacatgtcttgtgtgtttactttttagctgcagtgttgaagtatgaaaacaatgtcatgaacatcaggcagttcaactgttccccacacccctactggctcccaaacttcatggatgttttcacgtggtctttgccttttgttggagagaaaggtaagagaatccctgtgtgcatctgaacaccagctctcttctgatgagacacctttatattcccagagtttattggaaatgtgtgctaattttgtttgttctctacaaagattttaaaaatttttacttataaaaaaatctgacttgtgtgtgtgcaggatgtgtatgtgtgcagtactgggtgcaggatgtgtgtgtgtgcagtactgggtgcaggatgtgtatgcgtgcagtactgggcgcaggatgtgtatgcgtgcagtactgggcgcaggatgtgtatgtgtgcagtactgggtgcaagatgtgtgtgtgtgtgcagtactgggtgcaagatgtgtgtgtgtgcctgtgtgcatctgaacaccagctctcttctgatgagacacctttatattcccagagtttattggaaatgtgtgctaattttgtttgttctctacaaagattttaaaaatttttacttataaaaaaatctgacttgtgtgtgtgcaggatgtgtgtgtgtgcagtactgggtgcaggatgtgtgtgtgtgcagtactgggtgcaggatgtgtgtgtgtgcagtactgggtgcaggatgtgtgtgtgtgcagtactgggtgcaggatgtgtgtgtgtgcagtactgggtgcaggatgtgtgtgtgtgcagtactgggtgcaggatgtgtgtgtgtgtggagagggaagaggactacttcgtggagtgggttctctcctttcacctttacctgagcttcagggattgagctcaggtcaccagatttacataggaacaccttgatccagtgagccctatacagagatttttaaatggcattaatctgttcataaatattagtctattatggtttttctttatgtgaaatataaatttaaaacaactgtcttgtgtgatcaagatcttaaagtaatgtggccactattctatctcttcaatgaattatcagtgctaacagaatgtagactgaacttgttacagaggttcatgtgcacaatggcacaagtaagcagtacaaacataaaacacacttacacaactgagctgcgcaacgcaaacagacccacaagtgagcagtagagacagaaagtgagcccggtgggtggaggcccgttgtgatttctttgtaaaatggaaagttttatatgcatatctgagccaaaggttctgaacagctatgtaataaaatcaagtagttctgtgatagactccacaggttcttatccagccaggacaagtgtggacaaaaattctctctggggctggagagacggctcagtgggtaagagcactgactgctcttccgaaggtcctgagttcaaatcctagcaaccacatggtggctcccaacatccataatgagatctgacacccctcttctggagtgtctgaagacagctacagtgtacttacatataataaatacatttttaaaagaaaaaaagttctctctgaaccttatggtctacccttggttctattttcatagctaattataatgtgataagttgtttcggtctgtgtttacttaatgtattttaacttatgcacatccagaagtgtcctattaattgtgcacacactgtgttatttgccacttagtgacagagatgctggtcaatattctcaacatatgctcggatgaagaaatgaacgtaaccgatgaagaaggtaaacttcttactcaaatagaagctgatggcttctgatttctttttattggttttggtcttactagaaaagacttatgttcattgtaaaaaaaaaaaaaaaaaaagtttgctgagcagtggtggtgcatgcctttaataccaacacttgggaggcagaagcattcagatttctgagttcgaggccagcctggtctacagagtgagttccagggctatacagagaaaccctgtttcaggaaaaaaaaagtttgataactataggaaaccataaataggaagaaaatagtcactattgttctgccatctcaaatgtctgccatcaatgcctatgtgtaaactgtctttatctttacatagatcttttttcttctcatttttgtcacttacaaaaatgaggtgacatgctatcatgtctttatatctatttcttgttttcctttatagtctagtttttcatggttacatagttgtcacattcatcaatcactgtgctaaccaatattatagatgctgctgggtattatattttcccccacaactttagcttttaaaactgctacaatttgtcaccagatggaagaggcacacaccataatcccagcatttaggaggcagaggtagatggatctctgtgaattcaaagctagtcttggtctacagagtaagttccagagctacacagagaagccctgtcttgaaaaccaaactaaaacctgctaacagtttcaaatttgtatagataaatcactgctcattctatcaacagccagactttgttatatgcctgatgtgtgccaaatattgtttatgcctttcttcttaataaacatacattgtactatggaagacaaacaagaaataaatacaatgcagctactaatgcatgctatggaagaaagtagtgctgtattagtaactctgagagtaacatttacttgtttacttttataggttaaatgtctagaaactgcaaatatttcagtatttaatgcttaatctgatacagatagcatttttgtttgtttgtttgttttgttttgtttacacagggtttctctgtgtagccctggctgtcctggaactcactctgtagaccaggctggcctcaaactcagaaatgcgcctgcctctgcctcccaagtgctgggatcaaaggcatgcggcaccaccaccccatccccaccccaccccacccccgcatagatagccttttaaagtctatgttactctgtatctctttgtgtgtgctacatagttcataatgcttttcctagtactgtttattttcttattgcagtttacacacacacacacacacacacacacacacacacacacacacagagtgctgtagctagaacccagacattgtgtaagctagactagtgtttacctctgagctgtatccctagccctaaatttttaatttgtacttttatgatgactaataattgcatttttcttatgtctattgaccatattattttctgttttgtgaatgtaaattcatatattactagtttttcaactggatcctatgcatgttttgcttcctgtttgatatgtaagagatcttcgtgttgtgtcttaggatagtaatgctggttatatgtgtagctaagtgctttttttcccttctgatttctatcactattaattagtttgtttcctttagaagaattaagtttaaattaatttgtagccaggtgcttctagtgtgttgtgagtggtttgatctgaaaggtatgctctaacttgtctgaggatacaggagtttttggggtatggtgtcacatgatcacagacctccagttcatattctttgcaggtctatgtagttcacttaactattgcataaagtgttgtatggtggagaactcatagctcccactgggagtctagaggggattccaaaacatatgtgttattagattgtactgggagattataacagatggattatagcttatatcttctggataggaaattggtgaatggggcctgtccttttgaggaaatctgaaaggaactttaaaaagaacatagggaaagtaaaatattttaaaatggatttaataaattttatatgcacatctaaatagaaattgaaatggttgtaaactatgatctgtgttaagaaaaactttttgggcttgtgagatagcttagctgacgaaggctcttgctgatggggctgatggcctgagccccatccccaggcctcatgtggcaaaggaaacctagttctcacacattatctatgacctgcatacacaggctgcacagtgtgcacttggttctttcttctcaccaggtgggctctaaggctctaactcggtccagctttttggcaagcacccctacccactgagctgaaaatttgggtttttaaaaagtaatacatcctaaggacttctacttcagccctgcctgttaagacaactagaaaagttggacaaaatgttttttgaagttggttggtggcagtgcacgtccttaatcccagcactggggaggtagaggcaggtgaatctcttaagttcgaggccagcctggtctgcagaattccaggacaaccaagcctacaacagaggaaaaaccctgcctaaaaacaaaacaaaacaaagcaaaacaaaacaaaacacaaagttttatgaatagttttaagtccacatgaaagcagacaaactagtaaagaattacaaggtgagaaatgaaaaggtcagaaacgcagacagatgaggtagtgagaccatgtcttgagatcattcatgaatttcaaaggagtgggtaaaagggttaagaggaatttttataactttgtgtactaatcttaaaagaatgggctgaggactcccaaggagggtatatatgaatgtaagtttctgttcttgggacctcagagggtgactctgcaagagcaagggtgagccaggtggagatatactatacagtctctcgtcatcatctcagcctttggcatcaagtactccctggtagaaagatctctgtgaaataacagcatacaacatcccagtaggcagtctgtcaaatacagtgcattggtgacaagcaaaaataagcaggcacgtggggagctaacagcagaatgaggaagagaaagggttcccagaacagggctggcaggatggctcagtggtaaaggaacttactgcataggcttcacatattctagctttgacttcatagagctagtataagtctctgtccactgtgttcacactgtggcatgatcctccccattacgcatactcaggcatgcgtgcgcatgtacatatacataagcgcaataacaacaacagaaataagattttaaaaagttccagccaagcatgttgtcatacatctttaattacaccacttaggaggcagaggcaggtgactgtgtgtgtatggaatatagaagttctgggcagtcccaagatacataatgagactgtcacaaacaacaaagaattttcacagggcgtggtggcgcacgcctttaattccagcactcgggaggcagaggcagatgaatttctgagtttgaggccagcctggtctacagagtgagttctagggcagccagggctacacagagaaaccctgtctcaaaaaaacaaaaacaaaacaaaacaaacaacaacaacaacaaagaattttctgaagcagcagaaattaaatacagaccctccatagctctcaggcattggctttgttaagccaaacttaaagcaaagcaaaatcataatttgtttttttgggagattgactggcctggaactcactggcttgaaacatcacagagatcctcctgcctcagccttttgagccctacgattaagggtatccctggcttaatttaagaaattaaaagaccgggttaaaaatgttggtagagaattgtgaagtaaaagaaagtgtagcatatttgataaagcatcaaaagtgaaattatagcattgaaaaataagatgacaaattagcaagtttgatgcagtgagacagggactaagtgacctggaaggtaggtcagagcaaagctaactgaagcatggtgagaagggagtgcagagtcagccaagagcctcagaacacgcgctgccagcccagcacatggtgcctggagtaccagagaaagcgggaaaggcagtctctgaaaggtccacatcaaagcaacttccagaactgagaagacacggagctgtaactgaagaagccctcagcagagcaggacagacactgacaacagcttctagcctcttgtagtgaggtccacaagatggaagatggatctgaaaacagcttccaaatgggggtcacccctagggaagccgccgccgaaaagcaggttcttcatggagataggggagcagggctggagtaacacaccaatgtgtgaaaactaacacccagtactccagagtccagcacacagcaaatgtgtaaacaagaaaggccaaataaatatttgtagatacctctccaaccctcacatttactaagaaaattagcaggaaatatatactaaataaaattctaaaggacagtatttaagcagaaggaaaatccaagaaagaagtttagaaacacaggaaggaatgaagagaagtagagagcgcatgcacagacagtgtggacatggattcttgtcatgcttgaacaagcagagcatgtgccagtactatataagcaatactgggatgaatgcattcaaaatgtataggcctgaaaattctgatcaccccagcacctctgcatacatgataagccagtgttctgaactatagccccagccgttagccttatacttcagtacgtaacaaactcatagtgcaatctctaggttcagctggcttacaggttcagaggttcagtccattatgattctagtgggaagcatggcagcatccaggcaagcatggcaatggaggagctgagtgttctatctcctgttcctaaggccactaggagactgacttccagggagctaagatgagggtcttacagcccatgcccacaatgacacacttcctccaacaaggccacacctaatagtgccactccctgggccaagcatattcaaatcatcatatctctgataacactagcttgtatcaaggtgacataaaactagtcagtacaacctagccttgattgattctaaacttcagagggaaatggctaaagacttaaagaactccacaggagggcttgctctatagatgtcaagatttaatataatgctacagcaattaagatgatcaattcaagggtagctaagcattgaaacacaatagagaatccagaattaagctacatgtatatggatacttgattttatcagaggtgaaattttacaatggctttgtttgtgtgagacctcagtgtatagctctggctatgctggaactcactatgtagacaaggctggcctttaactcacagagatccaccagctctgggattaaaggtatgtgccaccatacctggccaataatggcatttaaaatactttgtagatatctacttttgaaaaaagtaaatcctcgtggatttattttgtggatccaaaatacctatttttgtgactatatttcattctgatctgaaaggtgcggaggctgggggtatggctctgcagtgcagtacttgcctagcatcctgaggtcctggctgcttctctagcatctctacatcacagcaacaaacaggccagtaacagccaagcagtgatgaattcctgtctctccagccctcacgactgtggcaagagaaccacaggctgaggccagtgtgggttatgtagtgagttggaggttagcctgagcttcatagagagtccctgtctcaagaaacaaacagcagaagttttttaaaactaaaatgtagggagtggggagatggctcagtggttaagaacactggcttctctttcagagatcttgagttcaaatcccagcaaccacatggtggctcacaaccatctataaagggatctgataccctcttctggtgtgtctgaagacagctactcacatacaaaaaataaatgaataatctttaaaaaaaaatctgaaatgtaaaacagtggattttgtagtatgtataatacagaattaccttgataactgtgcaatggaaaaaaatcctttaaacgggatgcaaaaaacactagccaccaagaaaattattaataaattagataaattgaaagcaagagctgggactggagagatggctcagtgactaagagcacatgcagcttttgcattcacatggctgctgccaactctggttccaggggtcttaatctgaagccttctctggtctctgagggacctgaatgcactcacatgcatgcaggtaaaacactcatgcacatatattaaaactaaaataagctaggtgtggtggcgcacgcctttaatcccagcacttgggaggcagaggcaggcagatctctgagttggaggccagcctggtctaccaagttccaggacagccaaggctacacagagaaaccctgtctcagaaacaacaacaacaacaacaacaaaaccaaaaaaacccaaaaaacaaaaaaaataaaaaactaaaatgaaggtaagagcttttgcttattcagagattttgttcagcatgtgaagtggcaagacatccagaaggatgggatatttgcagtacaagcaacaaacagcccattgacaaatgactgaattattcccaattaggatgatgtggcatgaataggcacctcagagaatttcctaatggctaacaaaaatataaaaatatattcagccccattagtaatcatgaaaatgcaaattaaaattataataggataatactctacttatcagattagtcagacttagatgagccatatctagtgttagccaacagcacatgtagtaacggagtgtccacatacagaagtaaaatgttatagatcccactctaatagacagtgctaaatgttgtccaaagttaaacatacccatgctctagagatgagcattctaatgtcctaggaacatgccagaaatgtgcatatgtgcaccaaagacagatacatacagaaatacatacagagcctcacatgcaatagccaaaagttagaagcaacacaaatgattactgttgtataggaatgaattgttgcatagttgaccaggcctgatacaacttttaacacttgggaggcagaagcaggcacatctctgtgagttcgaggccagcctggtctacttagtgaattctgggacagtcagggctatggaaagagactgtctcaaaaaccaaaataaaacaaaacaacaacatagtggcacagtgctatggtggggcagtgtgtgataatgaagatgggccatggtgaaaataagagtgtgtcttactgagatattgtcaccccagtgctcaattgtccaactatatgaaacccaaaacctaaaacctgggccactgagattattaattcaagggttgatgaacccactgccaggcctgagcaccttagttcagtgtctgggacccacatggtggaagaaaagaaacaattcttataagttgtcttctgacctccttgctgagtacacacaaagagaggataaataaatatagcttgttaaagaaaacaataaaaaccataagtgcgccgggcatggcgcaagcctttaaccccagtacttgggaggcagaggcaggtgaatttctgagttcgaggccagcctggtcttcagagtgagttgcaggacagccagggctacacagagaaaccctgtcttggaaaaccaaaaaaaaaaaaaaaaaaaagtaagtgcattcatccataaaattaaaaagacaggaagaagatagttctagtgaaaagcaagggacttatgtcctttggaccggagaggctacagtggtgaggtactatgggttgtgagcaacactggtattgccctgggtgactagttttacaggtatgtgccttttaacaaatcatgtcatgactagtttgctttgcataaatacagaaaacgtgtgcttcatagtaaaaaggtaaaaattacatgtctacaaatagaggagatcgaacttttggaagctgagaaaacattcattggcagtggtcagtggggagcgaagcaatttagaagatacataacaacagccctgaaaatgccaggacaaaaatctgctaatgcaaagcagatttaaaaaatattaaaaaaaaaaaagaaccccagaagatcttctcatgctgtaagaaaaacacatccaacgttaagatctgtctagggatggaacaaggtaacaggtgacttttaaatgtgttagtgtgctcacttagttggtttgggaacactaaagccctgtttagtgctagggaatgctgaatatcagtactagttgctagaactgagaataaaagagcaggcagggacactgcgctcactcaagtaaaataggtgagaacctttgaaaaaactgttaaaactctgcttgccatgggatacatgtccctcttctaagtctggaggctgatctccaaacgtaaaggcattctggactgtagatgacaaaggagaactcatgtccctaacagaggaccagcatgccatgctcagagccgtcagctgtctttttcccccgctctggaagtttgtgattccctccaagtcttacccatgagcaaacaccaaggaccatcagacccctaagcaatggccttacaagacagaagccacagaaaacaacttgaagtcctgaaggcttaaactttaaacctctaggaaggaaaatgtctactgacaagtgaggcatgctagcaagtcaaacagcagcaccgtgttcctgctgagagatctgtgagctattctgtcccacaaacagtatctttgtgctattttcatgctgggggtggggtggaaaatagtaaatgggaattaatgtgaagggtaaactattaagcaatgggaagataggacaaaactgggaatctgtatttagtcttggggagcaagcagtctctgagctgctccgctaacagcctgcatttcacacttggatttttttctcttccatgtaaactcccatcatcctcccatgtgtctgtcttcatctctttatttcttggtgtctcttctccctgaagatcactacatttcaagctgtccaaaaggtatccaactggaatgcactgccagctaagttcttgctgtctgctctgccactggtgattggttagtcgtcttgacttggtagtgggcagcttcacgtgactttccaccctccccctcagtgggaacggctgtcttctgtagacctgttgtgtgatttagctgagtggagaggtaggagagaggaggaaagcctgtgtagctttgtctgacttttggatgctattgcctggtatatgcctgaatcttatctttcatgtttgggctatttcctaaatctttaagaaaaggccataaagtcttacattaacttacattaacagtgttgctttttaaaataccttacccatccttgtaatctttgtggcacagttgttagtagtattctgaagaaacacagctggctggtataagggaggaagactgtagaaagagcgtggccttcctaagttcaggactgctgctgcctttggcagaccagaccccgcatccaaaggtggcgcgtagcattctcaaaggagatcttggcttgtaggagcaagtgctctattgctgtgagctttgtttgtgtctttgtgtttcattcctcaccatgtttcagaatatgaaacctcctgctccccatagatgactcggagtctttctgtgacctcttcattctccccttcatttcttctctcctgctgatttcttcttgttctttgcaacttcccaggattgttaattgtttttttaaaaatttaggctttgtttctttctcttttctttttttaagtttttctttaatttaaacataaaagcactccatcttgcatttgaaaagaaaaacctgtcctgttaatcatatcactttaacccacttgttctttgtattttctaaggagctactacaggtcgaaaagaagtcatcaagaataaaatccgagccattgggaaaatggcccgggtctttacggttcttcggtaaggttccatcgttacactgtgggatgagggtgtttagaaaggaggttacaagttagcttcacagcagtgttttcaaggattcagtctgatgctggaactgcaagtcttctggttgagtgcaggttaaacagactccctgtgaaagtgacagcattgggaacatccatgtggtagtggtgtagatggagaggtttagtgtggattttagaggtagatccccatgttcaaactctggctttccttagctgtgttgtcttgggtttaatgtttgggtcttagattttcttgtctataagctagagattaaaatagaacctagctcacatgttgttagtgagtcaaatgggagaaagtgtggggacgttgcctggctaccagtgcctctggttgaaaaaggactggttaatttttgtgtctgaagtgtatgtagaaacctggtcagatgaaggtggggcctgtcttcctgtctctgtccctgttaccttccttcaggtctcattgcgttgctgtgccatggctccctggcattaaccagggcttccatgttcctttgcagggaagagagtgagaatgtgctgaccctcaagggcctcactcccacaggcacactcccactgggggtcctctctggaggaaagcagaccattgagactggtgagtatgaagatgtcccttcctaagaggtgtgcccccattaccaggagttggtgacttttgtttagaacctggtgctagagcaatggatatttaccgagggaaagaggaatcattgtccttatccttcttgtacacaaaataattcaaagtagatagtaatttaggggaaaaagtgtgaagagtaggtattagagtaagcaaagtcttcaataagagacttttattattttaataaaagtaatgctcttaaaagaaaatagaggttattaaaattaaattccccttatgaaaatacataattaagagaaggaagaggcaagccacagaaaagatttctgcactacctatgactgacaaaggccttgtttcaaaatagacaatttatttcaccaaagaagatgtgaagatggccagcaaacatgtatgaagatgcccagcatagttactctcctggaagatgaatatgaaagcatagtgaaccacttctgcatacccataagaatggctggaatgtagaaatctgacgaggtcaagagttggtgtgtctatggaggcctggactagaagtaggctagtgggcttacacatagactcaacacattggccagctggtagccaataaagctgaagacacttggacccataccctgcaactccacaccaaggatatccaagaggaattagcatgcatgtccacccgaggatatgcataagcatgtttgtttactgtggttttatcatggtagctccagatcagaagcagctcccctgcctgttggtagtgaatacattatattatattgatacagtaggctactgctcacccattggacctgttgcattgaggtcaaagcacaagcttagctcctgtccatcagtaagaaagagtgtcactctgaaagccagtgatatcttgaagagttacacatgctttggaaataacatataagtaatccctaattaaagcactgattcaaaccagaaatgaagagacataaaatatactgggaccaagcccaaaaaggagtgaagaaaaaaaaatatgtatatacatacatatatatatatcccaagttactgcacctataaaattctcttgctacccttgatttgtagatttgctcctatgagatctagcaaaaaaattatattaaagcaactttgtggatcaataaatttttaaaacttcaagtaaggaagataggtaggcatttctctttttttcttaatccatgttacttcctattaacctaaaacaccctcatcagaactgttcacagaaaatctcatatgactaattaacaagtaaaataaaagtagttaagtatcttatatttttaaaagcctgtacatttctttagagatatggcctctaggaggtcgaccatccttcagaggatagttcacagccctgtgaaagagactaagtagattcagtgagttattaaacaacaaaaaaggagaggacatggagatggtgggaggtgggtatgatcaagatacactatatatgtacaaatgaagatcctgcaaccatggagttgagggtgcattggaaatactttatggacctgagagaggactcagtgggtaataaaagatacttattgccaaagttgatgacctgagtttggtcccacatggtggaagaagagaactatataaaagcagaaaaaccagccatatacataaaataaaaatcaacctaaaaaaagttaaccacagtcagtggtaactaagataggtttgatgatgatgatgaagtcagtaggtagctggatgtggctgcatgcttgtaatctcagcacttgagtggcagacatgggaggatcaggaaggagtttgatattctagctacacagcaaatttcagggatggcctggcctatatatgaccctgcttaaaaaaaatcgttttaaggattaatgagagcttcagtgtctgtaataaagctcttgcctggtgtgcatgaaacttttggtttgatccttaggactggggaaatgacagaaaggaaggaaagaaaggaaattgttgatgagattttagagaaatgaggtcatcctgtgctgcttgagggaatagagctactgtagagagaacattgtatcagttcttcagatgactaaatagagtcaccatagattcagcactgccaccctacacggccccctccagtgagagaaataaactatgtcctcaccaagacttgtatatcaatggtcatacatgacactttcaaaagagcctcacatggcattcttctgaacaccctaaagtagatgcgacttcagtgttcatccattggataacaaagtaaggtctatacagtgggattccacatagccataacaagaaggaatgcactcatatgcatcaaggctaggctatactgcatagtgagttccacgccagcctagcctacgtagtgagagcctgtctcaaaacagcaaaaatagtgacatacacacttgaaacaatgttctagcataggaattatatgtaaacagtttcataattttttttcttaccatgtcccttggtacatacagactgcatcttagtaaccaatgcaaaaaacagttcagtgagggccctaaaattttaatactggaggtctgtagagatggctcaacagttaagagtacttatggtctttgcaggggacctgaattcggttcccaaaaccacataatagctcaaagtcatccttgcctccagttccagggggtgtgacatcctcttctgatctccacatatgcaggcaaaacattcagacacatgaaataaataaatctagatttttttttttttgaaatgggatgctggtatatactttaccacacacattcaaactccaagtaaaccaccactctccgtagagttttagacggaactctggttcccaccttctcacagctgcagaggcagcaccctgctctgtgagaggtgctgtccctccttgtgtggcttatctggcccgtctgaggtcagagagactacagcagtgctctaacaggagccttcctaggggccattgcaggcacatgggtgctggccgccagatcctgctcttaaattgcagtgggaggtgaaggagcttcgcagctctctctctctcatagtgatgaaggaaacctcacggtggtcttgctgctgagtggccttccttccttccttaggaaagttgcccttggaggagctggcagggctctaatgggatctcattgctgtaccctggaaccatttcatgtgttacagcttgactgcctgacagaaagtggcagggggaagtttccctattggtgctcattttaattgcttccatttctggcaccggaagggagaagattgctttcttagtaattgacctgctttcttgcacaaggaaaagaagccatatgaggtgttagcgtgagcctctgccatgtcctgcatctcagatgggtacaaatcaattagagttcaaatcaatgcctagctgttcacctctagaccagaagtaactcttcacttataacctatttttctccccttccaaatgctagagctattcaagtactgtcctattcttttactattgtaattattaaatggttaaggacagttaggtcatgcgtaagtcatttaacaatactaagaagcaagattaaataggatttttaaataggactgagcaacagctcgattgatacaatctgagcagttacaagctcaaacatagttgtgatattaaattatctgatttaacaagtcattttgatgtgtgatgatcacaagacacaaccagcagttgatgatttcaaattcccatgccaacaggagtgttagaactgttagtgcctccccacctcatgcgcatgctcctgaggtaatcccctcccttctctctctgggtgggaccctggctgctttactgtcagttcactcatcctttctctgtcttcatttttgtatgcactgctcctgccttcttacagccaaacaagaagccgcagaggagcgggaaggtatggccatatccctcagccggaacacccctgtgtctgttcaccagcctccaagcttcattggcatgtcggaactcactagcatctgcagaaccctgacaggaaaggagaggatggccctcagggtggccacatgccagcctgtttctcagatggccatcacacagcctgtgtcctttctaagtctgtcagttttatgtaatgactgaagcttgtgcagctggtaatgacagaggtcaaatgatttaagtggttcctttctttattaagagagttaccgccgggcagtggtggtgcacgcctttaatcccagaggcagaggcagagaggcagagagagaggagaggcagagacaggcggatttctgagtttgaggccagcctggtctacacagtgagttccaggacaggcagggctacacagagaaactctgtctcaaaaaaacaaaacagacagacagacagagagagagagagagagagagagagagagagagagagaggagagaggagagagagtgtgagtgtgttacctggggctggagagatggctcagggattaagagcactaactgctcttccagaggtcctgagttcagttcccagcaaccacatggtggctcacagccatctgtaatgggatccgatgccctcttctggtgtgtctgaagacagcgtactcacatatataaagtaaataaatctttaaaaaataaaaataaattttaaaaagagttacccaataactcaaaggttagcaggagtttccctaagacatttcagcttagggtattttgtttctatggagacattttaaatcatactgcttatgaatttttagataaaaaccattggaattcacaaatctgcaatgtagatttagtaatctcattagataaggtgattcaaaggggaattcattccttggcaatacaaagttgtatctggttggaacagctcagtggtagaatgtttatctagagtatgtaaggcccagggttcaaaccctggtaccacaataaaaaatttcagtttaatcagatgggaagtatctagaagctatgttgatgtttttcatctgtgttcagctcctggctgtgaagataaaaagctgtttgagcagataggtctcctgtcacttgtgcatggctaatgccatgtttgtgcttaaagcagctatctgtgtgataggatgtgctttcctggtgttgccttttctaaaagtgagcagggttttcataagaaacttaacttccaagtgtgtggaggccaattaacacctaatcctttttatttctgccaggacttgttatacttttctcttctcttctctttttatgatttagttatttgttttacttacctgagtatactattgctctcttcagacaccccagaagagggcatcggattccattacagatggttgtgagccataatgtggttgctgggaattgaactcaggacctctagaagagcagccagtgctcttaaccactgtaccatctctccagccccaagacttgttattcttatggtagtttttaccacacttgagctgcttagaagcagtgtttgtgaacagagctgatttagccacgtgttgcctgtcagcagatgtgtgttctgtagctgctttcctgtgcgttcctaggagattgctgtgtgctgggaagcttggtttaagctgctaactttgccacctctctgagcacttcctaccccctcctgtctttctgcagccatcagaggttttacaattgcacacaggatccgaagttttgaagaagcccgaggtctagaccgaattaatgagagaatgccaccccgaaaagaggcttcatatcatcatgatgcagggaggatgcactcacactcgcatccgccacacccacaggcgtcaagaaggaccgaccatggaaagaaagccctgtaatgactcagggccctgtgcagcacagatgggtcccaaccctatgagcaaatcacatttatttatactggaaatgaaacaggaacaactcaaacaacttaaacttggaggtgcatttgtaattcagtcgcatttattctgtaagaaaaatgaccattttataaattcttctaatttatgttcaatatatatatatatataaaatacttttgttttgtttccctccccttgtcctaattttaggaacgaatctgattggttgggtgtgtgtgtgtgtgggtgtgtgtgtgtgtgttgaaatcttatgctataaaggggaccttcccctaataataagggccttggaaaccttcaccctagatttctgactcatactcctagttagccctcttcttgtttggggaggtgatttttttttttaatttatgacataactcgaaaatgtctttcaatagccaggcgtggtggtgcacacctttaatcccagcacttgggaggcagaggcaggtgaatttctgagttcgaggtcagcctggtctacaaagtgagttgtccaggacagccagggctacacagagaaaaaaaaaattgtctttcaaaatttcccttctgctcagtaccaatctcaatggctaaaattgcttctcttctgagggaaacttggacttccaagagaacagcccaaacctagtgatttttaagatccaggtggaactgcttccatagtaatttacttcctttcggcttctgagctctgtgattgtagagtgtgtgtgtgtgtgtgtgtgcgtgtgtgtgtgtgtgatacataagattgaaccaggccttgcacatgctgtgaaagccctctactgccccgctgggcctccactcctgggttcatgttaaaaagtaatcatcagggtgggctagtgaggttgcttagcctgcttacttaagtctgctccccaggaagaagaaaaccaacttacaaaagtcatcctctgaccttcacacaacattgtggaacaaacaaaataaacaagtaaatgcaataaaccttttaaaataataataatcctgagaggttttcttagacctgcttaaagtcacctcttcagctgttgccagattctttgctttcagtttctaaccccagatgaaccaacccattgtgaacatctctggaaggtcctcaggacgtgagcgctgagatctgtccttgtccctctgtgtcagcacgtcaagcatggcagctgctttcccagcattcttctgttttcactgtcagtgtgtctgaaaaaaaattctcaggtgttggaacgggctccttgtccactgaaccttgctaggcggtcagatgagtgaaggcctctgctcctacagttaatcaggaaactccttcccagtgtcaggtcattaggctgagccctggagccttgactagcatagtttggaacccaaaattagggattcatatttaattgccccttagatttttttttttttttttttgagataagagtctgattttgtagccctcactggcctggaattctctctatagaccaggctggccttgaactcacagagctccaactatctgccctgtgagtacccggattacacaaccacacccggctttgtttgtagtttttgagtcagggtctcatatagtccaggccagccctacacttatgaagctgaggctgtctttgacctcctgattttctcctttccatcctaagtgtgggcaccactccttgttgggctttttaacttttagtaggtgatgagggttgtcttatgtgtctgtcacctttgacccagtctggttgtaggtgccatggtccagtgttcactgatggctttctaatgactgctggagtctgggtacccttgatcaaagcttggaaagggtagatttgttagccctctttggtgccctgtgggatgtggaggtctagcactaaaaactaaaagcaagtatctcagacaataatataacaggttgagaagttcaggggaagcagaaaaaaacaacagtataactttttctttttaaaaaactgattttcatgaggaacatgaaaggttagcttgcctatctgtggggttttttggggggggagtgtgtcagggctatctgaactttggaactagagttagatgtggttgtgagaccccatatgagtgctgggatcgaacctcatactggttacgctgagtaacgagtgctctgaactgccaagccatctctctagccccatctggtttttgtggggttttattaagaaatacttttgctaacattttacagtttgtccatgacagatcagagagtgttttggaaccttcctgcgtggactgctttgttcattagagagaagaggtgcgatggtgacggcccacagtcccagcactggggaggtggaggcaggaaggtcagtatgtttaaggtcatccttagccagggagatggctcagaagggagaaatacttgtcacacaagcttgatgacccaagtgtgacccatggagctgactcaggaaagatgtcctctggtttccacacaggagccatagcatatgcatgcttgcactcacgaacactaagagtgatcataattaagggctagtgagatggctcggcagggggagaacttgtcttcatgtggggatgatcccaaatcctggaactcactctgtagaccaggctggcctcgaactcagaaaatccacctgcctctgcctcccgggtgtgccaccacgcccggcaagagaaagggtcttaactgtcaggagaaaacctgaaagaggggaaggaaactcccgaggaaggtcgtctttattgtcatttctttgtagcttatgctttctctccccccaagcccagtggtagaaatcatcctttctttagaaacctcacctatgaaagtcacagtagatcgtattgtgacacagtccactggtggaggcccctcactgctaaggacccataagaaggcagaagttctgaaagtccctaggaaccagaaatagttcagacttagtcttaggaatgtgttgaaataactactgtttcttctctttaaacttcattagaagtttttcacatcttttcagatttaaaaatctgaacacattttcctcctggttcctccattgcatttgccctagaccagctatttctgcttagggccataactccttttttaaagtagttggtttttttgttttttttgtttttgttttttggtgttttgttttgttttaatgtgcattggtgttttgcttgcatgtatatctgtgccagggtgccatgatcatctggaattggtgttatgggcaactgtgaggtgccatgtggatgctatgaattgagctaggtcttctggaaaagcagccagtcatcttaactactgagccatctctccagcgccaagaacccatttctttctttctttctttctttctttctttctttctttctttctttctttctttttttctctctctctctctttctttccttccttccgtctgcccgcctttctttctttctttctttctttctttctttctttctttctttctctttccttctctctctctttctatggttttagagctttattgtagaaaggcagagagaaagacggtagaaagaaaaagagaggccagccatggccacgtggagagaaggggaaagggaggaaggtagggctagagatgagaataagaaaggtgagagagctaaagaacccaagtgattagaatcagactccctaatgtgtgcatccatggtatgcatgtgcacgggtgggctgcttcatagtctgaaattatgcaaacagcttccagttttctctgaaatctcaaggtgacacctcatttgtcactagacattgatgataaaagtatacatggcttgtctcatgatgtggctcgttgcctaggaacaggggtgtcagactgtccaggaatgtcagcattgctcctgcctaccactgtctttcattgcatcatctcttcctccagagtagcttgctagccagtgaacaagttcctctcactagtgaacatttggttttctaccctgataacttaagaatggtttcctgtcgggcatggtggcgcacgcctttaatcccagcactcgggaggcagaggcaggcagatttcttagtttgaggccagcctggtctatagagtgagttccaggacagacagggctacacagtgaaaccctgtctctaaaaacaacaacaacaaaaaaaccttcagtacaggggacagagaaccccctattggttcagtcaatagaaaaatcatttgctatcattaagagcgaaggtaggatttctgaaaatggagtcgcttcaagacttcttcagccttggcattatcccttagttccttttctccgtgtggttttcaaacccagagtctgagacagctggtgtaatataagaaaaatactcaagtcatgtgagatgcagctgggtgccccgctttatagccaattatgcaagaactctctagtctacaaatgcggaagtaaaaatcccttctctctgccttatgtaaatcttctagctgatctcccaagcattttctgtatcatatctataaatatctgtaaagttcacactctagagaaacaagcgcatgctggccaatctcactggccacttacttatactggtttaggaaaatcctgcctcacattgttttcttcacattaatgatcattggattcctctgcccaacgtttgtgctgaaaatgatttcctaaccagtaaagacttgctgaggtagcactctagaaccccagtgtttaacctagctgttatggtaacagtggaactcagggggttttgctctcagttttccctacccaggcagaaaagaattccatagcaggagtggacctagaactcagggttgggtatgaggctccagtgtgctagattgtgtggttttaccttatctgacacccgtcctgtctttcctgtagcctgttagatcagtgtaaagagcagccaagacagcaagacactgaagagggtttgggtcacacagaggaatctctttcagttcttgccatgatcagaagctcatagggaagccgtaagaaagagcagatgagtgtagagaagaaagccagtttgccgaaggacaggagcagcgctctcatctggatgccagcaatgcgctgtgctaacaatagggctctgtgccattggcagtttgagagagggaaactacatgacattgggacttgggagctgtcctgcctctatctagccagccagagtgaatggggtcagtgttaacggccttcatctatgcagtcacaaaggtaaagatgatactgggagcatattccctcctgggaggccttggcctcacgcctcagcaactgtggcaagacgtgctaaataacacctttgtttgagccagggttatgcatcgtcaacaatttcatgccaagtctaggtggtttcagatcaagcagcagggacgtggacatggaccatccctctgtgcagctctgaagtagagccaagcacactgcctgcctgtaagtccctgcccacattccctttaccccctttcacagttctccaagtaccctccctgtctttctggtttggggggagggggagcgtatcaaagtgaagtgcacatgactagatgtaggtagccagaacctatggtttggggtgataaagatgtgatctgggctgggcacatgacgaagcaaaagaaccactgcaaatttgagggttgcctggtgtcacagtaaatggcaggctaatcagggctacataatgaaagcctgtgtttaaaacaagagaaaagggaaatgtgtttttgtctgtcccggagcctttgcaaagatgccatcaggagccccttatgttcattcctcccagcatcctaagccagagctcttttccccatcacccgacccttcctagaggattggctctctgtgtcacttcgtagatgatgaagcagtcagacatgccgatgtagatggtggctcccttgaatgatggcctattcgctcgtacttagaggttacctgcgttctcctgctttctgctatgttaaagacaatcctagaaatgttacctctcaacaggagacattagtctttgtgaataagttttataagaactttcttactatacactagaagtcctcttaagattaaaagaagcaaatgctcttataagtgaaggataacttcattgactccctgtgtctttatttccttgaattcttagtagagggactgatctttaggctctgacccagttagtaattccagcggtgagggaaagcctagtttctgatgtctggtctgatttctgacaatgccagtaagtcccttcacaagagaggatccctcagccttggttaaagctcagatggcctctgatgagtttctgcttcccaaccctcgcccgcctgcccacccaccctcctgcaaaccctgtttcctttgcctcttacctcttcctgaaattatgcccaccacgatctcctgccctagaccctctgcggcctttccagcagaggcccctccttgaaggagtagaaggatgataacccagaaaacagtctttacaaagcacaaaaatacattttacgatagtcatttactaagttttcatatgatctgggaaaagtcagaagctcaaagggagttgatgaaaagctgtactcctaagcttagcagtaccagaacagccttggagtcctctgcaaagcaaacagatcccagggggctgggaattcacaagagcagataagcatggctgcacagtttgggggtggagacagggaaaggctgaggccctggacagggacttggaaagattatggcaacagaggtggaaaggctaaatccaggtctgctgcatccaaatagcaacattgacatcaaatacagccacagtgtgcaattttaagaccagaaaaatgagcccggattttttaactgcacaaaagccaagtgagcattttatgttgttaccccagtgacatcctgagttaacagtggccttatcccttagctaaagccccagtgagatgaggtaatgtttgcccttatttcagagtcgtgggaagctgtttcagagcctaggaaagaaggatgagacactgagtcacactgacccctgctagattgagatctaatccctactttgttgtctgctctgggtaattagatggcttcactccttcttcttcttcttcttcttcctcctcctctcctcttcctcctcttcctcctcctcctcctcttcctcctcttctgcttcctcctcttcactttttaaaagatcacaactcttaagattttatttgcaaagcttactcttgatagtgcattggtcacttagaggtaaattgagtcttactgctaatacagtggagacagacagtttatcatagaactcaaggaggccagaagacaggctagcctttgtttggatagcagcactctatcatggtaccctctggccggccagtcagctctctgactcccttatctcagtttccctgagctgggatggaaggctgaggccgacccaattttccaggccctggttctttgcccttgtctgtggctgacttgacttccattccctctgagggcatcactctgcaaagtctgctttctcgagacctgtcacctacttgctccttccatccttttgtaagaaccaaaggaagcctgtctaggttggtccttctcaggcattcctgtctggccatggcatctgtttgtttatccacgaaaagggacgcatggtggatgtgatgtcagtcagtgtccaggcctcctggaggacagactggataaactgggcaggaactgattcttttcactgcctttggggtttagatgccaggaaacatgagatgcccatgatatgtgtgctatgaaaatatttgctcaaagcaggcctgaaatctccaggctcttgttcttgtggggttttacatacctgtccttgcttccaggtctgacattgacctgccttgacctgccctgtgtttttttattgttgttgcttcccttagagttccttcactttgcagtgactaaccccctcccccccccccaaaaaaaaacctcagacttccagatagaccagtgtgtaagagggcccttggagccccaaagtgggtcatttcacttccctcccttgcttgcccctgttctcatgagtgattggcataggtgggcccattgatagagcttagttggcagtactgccagacctggaatcaggagatggccccagggatgaaacagagtcgagatctgtgctagtatatctatggtgacttggcttcagctcctcactgctgggttggttacggactctagaagagtccgtgtgttcttggctactcccttctgatctgtagaaagagaacactcttctaagagcacaaaccaaaaaggacatgaaagcctacctcaagaatgtactgaagtttgtcctagggaaggaactagccggtgcctttctaccgaacaggaaggtcaggcctgcagcagagatgtcagtgtctcatccaaatgctagactgtcctggacactaattgtgattgagactaattggtagtcacttgactaatggtactttgagttggtggcggaggacaagaggactatggggctgaggggtgggggaatgtgcataggacagaattggctgcctggggctgggtggggctcctggtgactgggatcagatagctagaaaaaacagagcagttacgtaactgtgtttacatgggctcaggtggctgtggcaaccatggcagtccttgacccaaggccatgctggaggggtgcaggcagccgactactagggaaggaggtccctcttgagcagaagggtgtgcaggagacagagcatggcatactgaccagggctgcactatctgggacaatgttacctggctctaatgtgccactggaagctactcagggtgaggcaggcaggcagcagccagctacagctagggggaggggtcaggaaaccagacacctggctctctaagtccagtctctgaattcttgctacatttttctccctaatcttcttaaaagaggaagaattctccctaaatctgggcagaaaagagggcaggagattatttaagtttccttggacttacctgccctgcggtcctagcgcctcgtgcctccgtgttttgtaaagccatccgaatacttgtgaacacagtgagctccaacctgagaggtggcgagccagccccggcctgactgacaaagcagagctgcagcagttcagccctccattgccaccctccccgttcctcccaacctacatcctccaagactgtttactagactccccatccccatagagatgggactggtagccagtcctcagctcccttgcccacactgtgccttctcttgtgagaa

SEQ ID NO: 1614 - DNA, 1964 bp, Mus musculus
gttgtgtccctcagccgcggtcgccgtagctctcgacgcggtcgtccccgccgagccgcggcgccgccgcagggagggagcggcgctgcggcccgccgcgtccgaggacgccccgtattccggggccggcacgtggctgccgctcgccgagcgcagcccgcctaggaggaaggcggcggcttgcgtccagcgggccgccggagccgggaggagaccatgtccgtgaggcgccctcagttctccacgaccgagcgcgtcatcaaagctgtcccctttcctccaacccgacggctaactttgaaggaagtttttgagaatgggaaacctaaaatggatcttttgaaaaaccatttagtaaaagaaggtcgggtggaagaggaggtggccttaaagatcatcaatgatggggctgccatcctgaagcaggagaagaccatgatagaggtggaggctccgatcacagtgtgtggtgatgttcatggacaattctttgacctgatgaagttgtttgaagttgggggatcacctagtaatactcgctacctcttcctgggtgactatgtggacagaggctatttcagtatagagtgtgtgctgtatctatggagcttaaagattaaccatcctaaaacattgtttctgcttcgaggaaatcatgaatgcaggcatcttacagagtacttcaccttcaaacaggaatgtcggatcaagtattcagagatggtgtacgatgcgtgcatgcacactttcgactgtcttcctcttgctgccctcttaaaccagcagtttctctgtgtacatggaggaatgtctcctgaaattacttgtttagaggacattaggaaattagataggttttctgagcctcctgcttttgggccagtgtgtgacctgctgtggtctgatcccttagaggactacggcagcgagaagaccctggagcactatacccacaacactgtccgaggctgctcctacttcttcagttaccctgcagtttgtgaatttttacagaacaacagtttattatcaataatcagagcccatgaagcccaggatgcggggtaccgaatgtataggaagaaccaagcaactggctttccgtcacttattacgattttctctgcccctaattacctagatgtctataacaataaagctgcagtgttgaagtatgaaaacaatgtcatgaacatcaggcagttcaactgttccccacacccctactggctcccaaacttcatggatgttttcacgtggtctttgccttttgttggagagaaagtgacagagatgctggtcaatattctcaacatatgctcggatgaagaaatgaacgtaaccgatgaagaaggagctactacaggtcgaaaagaagtcatcaagaataaaatccgagccattgggaaaatggcccgggtctttacggttcttcgggaagagagtgagaatgtgctgaccctcaagggcctcactcccacaggcacactcccactgggggtcctctctggaggaaagcagaccattgagactgccaaacaagaagccgcagaggagcgggaagccatcagaggttttacaattgcacacaggatccgaagttttgaagaagcccgaggtctagaccgaattaatgagagaatgccaccccgaaaagaggcttcatatcatcatgatgcagggaggatgcactcacactcgcatccgccacacccacaggcgtcaagaaggaccgaccatggaaagaaagccctgtaatgactcagggccctgtgcagcacagatgggtcccaaccctatgagcaaatcacatttatttatactggaaatgaaacaggaacaactcaaacaacttaaacttggaggtgcatttgtaattcagtcgcatttattctgtaagaaaaatgaccattttataaattcttctaatttatgttcaatataaaaaaaaaaaaaaaaaaaaa

SEQ ID NO: 1615 - DNA, 1542 bp, Mus musculus
atgtccgtgaggcgccctcagttctccacgaccgagcgcgtcatcaaagctgtcccctttcctccaacccgacggctaactttgaaggaagtttttgagaatgggaaacctaaaatggatcttttgaaaaaccatttagtaaaagaaggtcgggtggaagaggaggtggccttaaagatcatcaatgatggggctgccatcctgaagcaggagaagaccatgatagaggtggaggctccgatcacagtgtgtggtgatgttcatggacaattctttgacctgatgaagttgtttgaagttgggggatcacctagtaatactcgctacctcttcctgggtgactatgtggacagaggctatttcagtatagagtgtgtgctgtatctatggagcttaaagattaaccatcctaaaacattgtttctgcttcgaggaaatcatgaatgcaggcatcttacagagtacttcaccttcaaacaggaatgtcggatcaagtattcagagatggtgtacgatgcgtgcatgcacactttcgactgtcttcctcttgctgccctcttaaaccagcagtttctctgtgtacatggaggaatgtctcctgaaattacttgtttagaggacattaggaaattagataggttttctgagcctcctgcttttgggccagtgtgtgacctgctgtggtctgatcccttagaggactacggcagcgagaagaccctggagcactatacccacaacactgtccgaggctgctcctacttcttcagttaccctgcagtttgtgaatttttacagaacaacagtttattatcaataatcagagcccatgaagcccaggatgcggggtaccgaatgtataggaagaaccaagcaactggctttccgtcacttattacgattttctctgcccctaattacctagatgtctataacaataaagctgcagtgttgaagtatgaaaacaatgtcatgaacatcaggcagttcaactgttccccacacccctactggctcccaaacttcatggatgttttcacgtggtctttgccttttgttggagagaaagtgacagagatgctggtcaatattctcaacatatgctcggatgaagaaatgaacgtaaccgatgaagaaggagctactacaggtcgaaaagaagtcatcaagaataaaatccgagccattgggaaaatggcccgggtctttacggttcttcgggaagagagtgagaatgtgctgaccctcaagggcctcactcccacaggcacactcccactgggggtcctctctggaggaaagcagaccattgagactgccaaacaagaagccgcagaggagcgggaagccatcagaggttttacaattgcacacaggatccgaagttttgaagaagcccgaggtctagaccgaattaatgagagaatgccaccccgaaaagaggcttcatatcatcatgatgcagggaggatgcactcacactcgcatccgccacacccacaggcgtcaagaaggaccgaccatggaaagaaagccctgtaa

SEQ ID NO: 1616 - DNA, 96595 bp, Homo sapiens
gggactacaggcacgtgccaccacacctggctaattttttgtatttttagtagagacagggtttcactgtgttagccaggatagtctcgatcgcctgacctcatgatccacctgcctcagcctcccaaagtgctgggattacagacgtgagccaccgtgcctggcctatatagtgcttttcatataaaattgcagattatacattataatataccttttgttttgtgtagctattttagaaatgctcattttactatggtttttaaaatattctacagttctcttacctgcatttaacacagaagttgaacatttaatggcttcatataaatagaaactgacgccaggttactttcacacaacagtggaaacaagggttccctgtgcttttgttaaattaaaagtgttcataattatgtctcagaggagctggtcattaatcaaggtttaggaagcgcttagggagtttcatgaggaaatacaccaaagctcacaagccctgtaagaaggaaacccagatttgaagaaatgtgtagaaatgatagttaaacatgaatcttggttatttcaaatatttatgtcttctgactgaccaatgcagaaaataaaaaaaagtggggggatacaaaattcaccaagtggacatctggccaggtggagagatccaccagctgaatgaaattgggctctccaatgattcttgagaattgttaatgtctaaaaacaccaccacacaagcaatgaacttaaacctaatttgttatggaaaacaattgtttgggaagggagctcaattagagctttcttctttttaaattttcatggagtggctctagatgttttgtttgtttttgttttaatcagaaaagacattgagaaagcaatgaatgtttaactctattggaactaggccactaaaagaaaagagcagccggcacggtgcctcatgcctctaatcccaacactttgtgaggccaaggtgggaggatcgctttagtccaggagttccagaccagagtgggcaacataggaagaccccccatctctaaaaaaagaaaaaaatagctggacatggcagtggcatgcctgtggtcccagctacttgggaggctgaggttagaggatcacttgagcccagggagatagaggctgcagtgagctatgatcatgccactgcactccagcttgggcgacagagcaagaccctgtctcaataaataaacatataaataaataggtgaagataaagaaaagtgcttccttctttctttttctttcactctgtctctttctctctgctccttccctcccttctctctctcttctccctccttcctttttctctctctctctctctttttctctctttctttcttttagaacagggtcttgctctgccacccaggctgtagtgtggtggtgtgatcatggttcacttcagcctcaactccctgggtccaagtgatcctcctacctcggcctcccgagtagctgggaccacaggtgttcaccaccgtgcccggctaatttttttttttttttttttgagatggagtcctgctcttgttgcccacgctggagtgcaatggcatgatctcagctcactgcaacctccggctcccaggttcaagtgattctcctgtctcagcctcccaagtagctgggattacaggcacctgccacaacacccggctattttttttttttttttttttgtagagatgggttttaccatgttggacaggttggtctcgaactcctgacctcaggtgatccacccacctcagcctcccaaagtgctgggattataggcattaaccatcgtgctcggccacctggctaatttttaaaaaaaatttttggtaaagatggggtctccctatgtcattgcccaggccggtctggaactcctgggctcaagcgatccttgtgcctcagcctcccaaagtgctgggattacagtcatgagcctctgcacctggccttattttcacctatttataaagcaatactttctcaccacagaaaattggaaagataaagaaattttttttattacaccaccaagtgatggctactgttcacatttttttccttgatagattatgctcagtgagggtatgaattatgtcagttttggttcgtttccatatccttaacacagtgcctggcacacagtccacacctaattcatacttgttgaatgagtatattaatattttcttgaggtcttttatttttaaagaaatggagtcttgctatgttgtccaggatggagtgcagtggctattcacaggcaagaaaatagtgtaatatgacctcaaactcctgggctcaatagatcctcctgcctcagcctcccaagcagctgggactacaggtgaataccactatgcctggcttaagacttttattttatgctttttttttttttttttttttgagacagggtctcactctgtcaccaaggctggaatgcagtgatgcgatcttggctcactgcagccttaacctcagagaccgcccacctcagcctcccaagcaatcctcccatctcagcctcccaagtagctgggaccacaggcgcatgccaccacacctagctaatttttctgtattttttatagagacgcggtttcaccatattgcccaagctggtctcaacctcctgagctcaagtgatcttcccgccttggcctccaaagtgctgagattacaggcgtgagccactgcactcggccatgtttatgtttttgtttttgtttttttagatggagttttgctctgttgcccaggctggagtgcaatggtgccatctcagctcactgcaacctctgccgcttgggttgaagcgattatcctgtctaagcctcccgagtaactgagccagccatgtttgttaataaaaatggggacaatactgtatatatatggttatattttagctttttcacttttcagtatctcctgaggcttttctcatgtcattaaatatttttctaatttaaaatatggtatttcctaactgcatgatgttccattcaatcatatttcatgtaaccatttttcctatatggatgaaatcatatagtagatatcattttgtggcttgcttcttttgctcagcgtaatgtattttagaggttcattcatgttgttgcctgtagcagtaattatttctcttttattagctgaatagtattccattctatggaattttacaattaacatctaaaaaaaaataatgaactgcttataggagggaagctgggtgctcttttccacagcacacatactaaaataggaatgatacagagaagattaccatggctcctgtgcaaggatgacacacacatttgtgaagcattaaaagaaaaaaaaagaaggaaactgagggcagggaaataagtgagaatttacttttcttctacatacttttgcagtatttaatttttttcttttctttttttttctttttttttttttgatactgagtcttactcgcccagggtggagtgcagtggtgcaatctcggctcaccgcaacctccgcctcctgggttcaagcaattctcctgccccagcctcctgagtagctgggactacaggcgtgcgccaccacgcctggctaattttttgtatttttagcagagatgggggtctcaccatgttggccaggctggcctcgaactcctgacctcaggtgatccacccacctcggcttcccaaagtgctgggattacaggcatgagcaccatgcccagcctttaattttgttaaaccatgggcatgtgttacttttaaaaatatatatttaaagcatttaaaaaattctgagagcagagttgggttcaagttgtactttgaactacctgtgtgacagtgggtaagtggcttgatgtctctggactcatttccctcacctgtaatataataatgttggtccatatgaatccttggtctttggcctcttagatactccaattggccagttatcttttgaatcaaactttatctactgaggcatactaaattattacatataaggaatggaggtgattagtgattcattatatccacaaacacctactgagcaaccacaatataaatgggccatgctagaaactggaaatataggctgggtgcagtggctcatgcctgtaaatcccagcactttaggaggcaggccgatgtggaaggaccacttgaggccaggagttccagacagactgggcaacatagcaaggccccatctctgcaaaaaagaaattaaaaaaagctgggcctagtggtgtgtgtctgtagtcccagctactcaggaggctgaagtgggaggattgctagaggctaggagttggaggctgcagtgagctatgacggtgccactgcactctagcctgggcaacagagaagatcctgtctcaaaatacataaataaatgacaatttttaaaaaagaagaaactggatatagtctctgccttaatagtctaggtggggaaaacagccacatgtgaataaataatatcctccatgcattaggtggttgatctgtttacaaaacgctcttggtccacagaggaaggctttacctctacctggatggattaagaaaggcttcagagaggtgagtataacagggctggatcttaagggcatggctgaacttgtgagtcgaagtagagaaggaagggtgtttccaggatataaggatcaaatatccaaaggagtggagccctgaacatatccactatattccaaccccatgcctctgtacagctttgcccaacctaggacacctcccttcctccttgctgttcacatcccatccttccttagagggctgcagccctgaaaaaacatagcaaatggtttcaagtggccggcctgaaagatctcatggggctacggacagagagaagctgtagaggtgagtcagggtcaggctgggaaggaactgttgggccaggttaaagggttcaaactcgatcccaagggcgccagggagccactgaagggagatgaggagcagagtcaatagtcagattttctgtacaaagttgactctgggccaggtatggtggctcacacctgtagtcccagtactttggggggctgaggcaggagcattgcttgaggccaggagttggagcccagcctgggcaacattgcaagaccgagtctctacaaaaaatttaaaaaattagctgagtgtggtggtgtacacctgcagtctcagctactcaggaggctaaggtggaaggattgcttgagcctgggaggttgaggctgcagtgagctgtaatcatgccactccagcctgggggacactccagcctgggggacagagtgagaccttatctcaaaaaaaaaaaaagttgattctggggtcaatgtggacaatggatgaagataagaggtcaagaccaaagactcagggaccagttaagaagctgatgcagcggagggttagcccctattcactcccagcctttatgccctgagaatagctgattctattacagaatcagttgagatggattcccgcagagagcaagacacgttccctgtgtctgccccaaacaacccaaagtcttttgaaacctctactaggatgggaaagcaccaatgcgatgggtgaaggtttctggtggtctcagcttatacagatcaaagcctttccaacctggtttcctcccggagaaatccatggatctaacgccctcttccaaacacagagatagaaagtgaggagaactattaggagcagggctgcaatcccagctatcgggaggctgaggcagggagaattgcttgaaccggggaggcggaggttgcagtgaacctagattgtgccactgcactccagcctgggcagcctgggcgacagagtgagactctgtctcaattaaaagaaaaaaaaaaaagaaaagaaaagaaaaagaaaagaaaacattgcaaaccaatgggaagggatgtattattcaataatagtaatggaaaaattaaccgactactgtatttagatctcaagttggggccatctcataacatccaaataaaatgaacctcatttaatgtgttcctatagttcagtctgttctcacagcaagctctggagcctgagttgtaccacaaagatattcttaccttgaggcaaacttagtctgacctggaggccctgatagccattgcccctaggactgggggagggatggtcataactccttaggggaaggggcgcccattcaacctaaggcaattctctggagaaggggcagcaatgaactgtcagccaccagccctcaagaaacaggcagagtacggtagctcatgcctataatcccagtactttgagaggccgatgcaggaggatcacttgagcccagcagttcaaggcttcagtgagctatgatggcaccacttcactccagcctgggcaacagagcaagacctcatctctctcttagaacaaaaacaaaaacaaaaacaaaaacagcagcaaccagaagatggttatccctcatggtgaaggggatctgggcagggcatccccgcctctgctacagggagggcctattaatattatcatccccatattacaaaagaggaaagcaaggcctgagaagtgaaggaacttacccatgcccacagctggaagtgatggtatcaaggtctgttgggtgtcactggctgttgctggaagactaagcagctattgaaacagaggaccagcaaggaacttggagaaaggcagagctactgagtgaatctccttagaaaggggtggggaaggccgaggcgggcagatcacgaggtcaggaaatcgagaccaccctggccaacatggtgaaaccccatctctactaaaaatactaaaaatacaaaaaaattagctgggtgtggtggcatgcgactgtagtcccagctacttgggaggctgaggaaggagaatcacttgaacccaggaggtggagtttgcagtgagctgagatcacgccactgctctccagcctggtgacagagcgagactccgtctcaaaaaaaaaaaaaaaaaaaagtgggggtggggacacgaagggacagggctgcaagttgctcacaattactttgctaaagccaagctacagaatgacatctggattctgtaaattcatgtataccatgcttgaggactcatgccgcatattccacgtggtgctatagaaaaagttcgtggtgctatagaaaaagttcaggtactgcacgtctcttgacgatgatggtgttcactaagcctcctaccagctctgtgactttgggcaagtttcttcacatctctgtgcctcagtttccttatctgtaaaatggggataatcatataaatggggttggtgtgaggattgaacgagttagtatttgtggggttttttggttttgtgtttgagatagatggagtctgtctctgtgcccaggctggaatgcggtggcaccatcttggctctctgcaacctccgcctcccgggttcgagcgattctcctgcctcagcgtcccgagtagctgggactacaggcgtccaccaccacgcccagctaatttttgtatttttagcagagatgagtttttgccacgttggccaggctggtctcaaactcgtgacctcaggtgattcgcccacctcagccttccaaagtgctgggattacaggcattagccactgtgcccggcctgcaacgttttctttttctttttttctttttggagacagtctcgctctgtcacccaggctggagtgccggggcgtaatcttggctcactggaacctccgcctcccggattcaagcgattctcctccctcagcctctcgagtagctgggattacaggcatgtgccaccacgctaggctaatttttgtatttttagtagagacggggtttcaccacgttggccaggctgttttcaaacccctgacttcaggtgatccgcctgccttggcctcccaaagtgctgggattacaggcgtgagccaccttgcccggcccgcaatgttttttctttctttccttctttctttctttattttattttttttttgagacggagtctcgctctattgcccaggctggagtggtgcagtggcgcgatctcggctcactgcaagctccgcctcccgggttcacgccattctcctgccttagtcttccaagtagctaggactacaggcgcctgccaccacgcccggctaattttttgtatttttagtagagacggggttgcaccgtgttagccaggatggcctcgatctcctgacctcgtgatccacccacctcggcctcccaaagtgctgggattacaggcgtgagccaccccacccggtctttttttttttcttttttgccggcccgcaatgttttcttaaactttttatttttagctatcctgttgaggttcttccagatgaattttagcctctgacccaggggtatgatttgataggcgtggagttctggttacttcttaaatgaagagtttccccaggatatctgaacaattctcttgggtggaagactcaaggatcatgaaaacgaaaaccaaattctagtcggctcctaaagtccttttgcctcctgcggttaccatcaaagagctatggtcaaaattccaagggataattcagggtctgattccactatatatccccagaccgcctatacataaatccatattattggagatttacgcttaatcctataatcttttacctaacagctgtccagtagaattttctggatgtccaataaggtagccgcgtgtagctcttgaacacttgaaatgtggctagtcccctagaggaacgggattaatttaaatttacatagctacaactacttatcggtcactgcggtaattgttaagactggttttgcctgtaacttgcatatgttttattggacatcagtttcaatatttcatttgcattgctaaaagtcaaaatccttttgactttgccagttactcagtgagaggacagttggagccagtttctgttctaggcttacagttttaaggacagataaaggttagtttttaacctcgagatgaacagactgttaagtttctacggacttgcccatggggttccacagtgagcctgggccggggaggcaggtactgtgtcagggggaagaaaaaaggggcttctagctgggcaggtgacacacagggcataggaagaggtcagttcttgtggccgaggaggtccggcccgggggtcccaggagcagagatctcccttctcttcgatgtggaaagtgaggagggagcagagccttgctcagaaacggagctcccccaatcccccaccgccctagctactggactggaactaggatggacacgaatgtccttctcattgtactaactgcactcaacaagcgggaaagatgaagcgagggggtttaaatgtgtgcgtttgttgaatgacccacaaaaactgaaggagcgcggccggactgatcacactccttgagacaaagcgggtgggagacccagaggtgaggagggtggtcgcctgtgggcgaggactgggaggccaggggttctcggcgaggcggtcccaggaggcggcgcggagccgctgcgaggccgcagggccgggtcgcaagatggccgggccggcctcccgcgcgggtcgcgcgggccacgcgggcgggtttcagatgttccgggcccgggtaggggctggcaggagagaaggggccggctgcggggagggctggctgagaagaagcgaaaatgggcggttagcagcagggacccggagccggaggagccgagagcagcgcgtgcgccgagctctactgcctcgcgggaaggcggaagggtggggagggcggcgctcggggcgggaggcccggccgggtccgctaggacagcggggccgctgggaagttgtgagagcggcgctcgggggcgcgcttgcgtgcacgagggcccgggccgcgagcagccgcggccgtcccggtcgccacccttagcagcggtcgcggtcggtgccgaagcggtgttccccgccttagccgctggcgcctcccaagagagcggccggtgggccctcgtcctgtcagtggcgtcggaggccggcgctgcggtggccgcgcccttctggtgctcggacaccgctgaggagccggggccgggcacggctggctgacggctccgggcagctaaggctgcccgaggagaaggcggcggccgcggcgtaggcgcacgtccggcgggctcctggagcctggaggaggccgaggggaccatgtccgggaggcgcttccacctctccaccaccgaccgcgtcatcaaaggtgcctggcgggccgggccttcctctgggacccgcgggaaacggccttcggctgggcggcggctcggggcggagggaggctggggccgggctgcgcccaccctaggagggctcggaggggtgtagacagagccgggcggcagcctccgagagcagccacccggacccggcgttttctgctgcacctggtcaggtgcctggccgtcagtgccaagttccctcccgaagggttcagggtgcagtggggacttcttctcccaccgccccgaagggcccggatccctgtctttttttctctttaagaaacgactcgggggaagccatcgggggtggtgtgagcagggagtcgactcttccaagtaagatatttaagattagatctttcttgacgtccgccccccacccttttttaggacgtataccatgtgccttttgacccgctttctctagatcattgcaagtcactgctattactggaataaacttagtatgaacaagtcagataaatccattatatgatgtttaaaataagtttacggagctcttgacagggtaatggtattttattttccctttggttataaagacttggagaatgacgttttctgattcatatgtgtacctgcgttagatttctgttgttgttataagaacaaaatgtaaagggctctttgctctctaaatcttgtagagttttaggttatagttgtttctccctttaaactaagaagatggattacacataaccactaatttatgtgctgcttttattcagccgtaagtcttaggcacaacccttctctctgagattaacaatcggtttgaaagcgctattttgtaagaagggaatagacttagaccagctgtgttagtggcctctggatgcaggggttagcgtgacagtggggaaaattattaagatacttttcttctttttcattttggtattagaaggagaaaggcaactaatactagtgacgggaatacatttttaaaaggtgaaacgccttattgcatgttcagggagggggaagaattttagtgtataacttaggtttcccccctctctccccaaatcagcctcataaatgttaattatctgtactacataattataatgggatttttgagatttatctgcttagcatttgtatgctatcgttagaggtttaactgaattgttcatctaactgacattatcccctgaacagctaaattattgtgaccatttaaatgtgtcttcatattattagtgtatagcctataagaagtatatagccctctcttaagattcagagtgtacttaacataaccttttttgaggaatcaaggtcattatgtacattaatttctgtactgtgctgttaatatggccggtgcgttctgctgtataaagttgttagcagtttcgtcctgtactaaaatgacttcgcaatgctataccagttcagtgttttgtttgcttttagtttctctctccagtactgttttctgtcaaaatatgcccttaactgctttctaatctgctacgtcttagctgaagtaggcagggaaaccagataagccagaactgtgggtcaagtcagaataaataggatcttagtgaagcttagtgcagccctcaggaatctcacaatcaaatcaccattgtgccatgtaatttccaccataacatgccataagatcaaaagaagattaaaaatcttaaatgacccttaaatatagtaataaatattgtaaaataaaatgtaataaaataaaaaagttaaaatgcaggggctaggggcaggcatggtggctcacgcctgtaaccccagcactttggaaggcccatataggcagatcactgaggtcaggagttcgaaaccagcctggccaacatggcgaaactccatctctactaaacatacaaaaattagctgggcatggtggcgggcactgtaatcccagctacttgggagtctgaggcacgagaattgcttgaacccgggaggcggaggttgcagtgagccaaaatggtgccactgcattccagtctgggcaacagagtgaaactctctctaaaaaaaaaaaaaaaaaaaagcaggggctggtttattgctacgcatgcttattattaaataaacactgtcatcatatcctgcaggatgcaaatttgttctttaccaaaattaattaccgaatattgtgtacttttaagactgctcttaaataaatgaaatagaaataatttcaggtccttagaatgtatggatttctctcctatataaaaacttcggcataagagcttgaccacagcatttgtggcttcatgatgacttatggtgcttttttcagggttttccagagtttgaaatagttgaagaaaatgaggtgtcacgtgtgcatagctaaggtccattgtaacgggtactaaaccctggtctgatgctatcttgtttagtcacagctgtctgcatttattcacagcttgaaagctttttcagaggtgataccacaccccagctatttttgtttctgtcatttcctgttaactttaaagtgtacctaattgttctatttgagcaaattttggagaagagtgggtatgtgggagaggtttgtattttaggtgtcctttaaatagcagctttcttaaattgaaggatgtggctgggcgtggtggctcacacctgtaatgccagctacttgggaggctgaggcaggagaatcgcttgaacccaggaggcagaggctatagtgagccaagattgtgccactgtactgtagcctgggcgacaagagtgaaactcagtctcaagccaaaaaaaaaaaaaaaactcatctgtaaaatagggttaataataccttccctgtcaagcctgggtcatgcaagtgacataaagcatgtgaaaaggtcaagttaaggtagtactttgagacatgataataggttggtaatagatcgcttactacagaagtagttagtagagatatcattaacatttgaaaatatcagaaagtatgtgaaattataagctacaaaactgttcctagtcaggtgaatacctattctacagcataatggatatgtgggtgaaatctcgtcggtaacaatgtgaagagatcagcacagttctgtctggtactccctaggcagcagatttcttctctatctgttgaaggtgtttattttatgtttaaaccttcttatgattttactcattcattaaatgtttattgagtgccatctgcaatgtaccctagtaggttgctcattcatttcttctttgctttaaaagtagcatttctgtgagcctttagagcagtttatatgcactggggcaccataactggtatctaagccagagaactaggcacccaaatgattaaattgtgatattctgtctgctttatttttttttctagtttccacgttccttttcctgtttaaggacatgttttttctttgacagtgatttttataaaagcagtttatttccctggaatgaatcttttcagaagcaacaaggaaatttcagtaggaattacatgacaaatatagagaatccattgtcttattttgttactttatggccagatggggtttaacagaaaagtcagatttctttttagtaaggtgctgatacatttctccctttctcttagaattcaaatatattgtgtattcacagagtactgtaccatttttaccacacatggcaggctactgtttctttaatatcgtggcactgggaatattgtgcttatggctttcttaaaatattttaatattagtgtggacaaaaattgctatttctacaaatataccctaaacccgatttcaatctctggtacctatacttcatttctttccacaactctcccccgactctcccttttttatatccataatggatttaccgagggtttaaaattttttctcttaaatataagcttaatcctgctacttatacaatttgaaaatcagaaagggaagaaaagaaagacttcatattccttcccagcagaaataactgcttttaatacctttgtgtgtttccatctgcaggtatattttgaattcaaaggaaaatggatcacacatattaaagcttttgttatgcaaatatttcatattattttaacataaatattgtaattttacctaaatatttccataatggtttcaatcagcatggaaatggttttagagtgcttatattaatattttggttctttatattttcagtggggacacattagtcacttgatacaataccaacccagaagaaacattttcaagtataaattttcaatgtgaatacgttttaaagttgatatctcctggatttgtcaacagtatttgtttaatttatgcttcatttaccattgtgattaacaagctgccaaacttttgaaacattcaaaatcagtgctaatcgagattcatacatctgagtagaaatctggaacctctgaaagggcatcttaatttaaacacttaatttttttctttttgagcaaggataaagtattctttcttacctatacgttattggttgtgatcaaagctttatttatggtctgacatttgataattaagctttctctcttttattgcattttaaaataggattaaaaattttttttgccttacgtaatttttagtgtaccataacttttactggagtgtatatgggaaaatgtacaaattataaatgtacagcttagtgagtttttacaaatttagcacccacatacccatgtaaccactcaaccaaaataaatagattaccagaatcccagaaacaagcatgagttcacgttcagtccactggtttccatccctaaatgggcaacagtggggaaaatatgacacttgtaaccattattctggcgtctaacgtcatatttgtaaagtaacatactaatcacatcttactgtaaagtgaaaaaaacaagggactctgagagaaaaatgctaaggactcattacttaaagtgaaataattaattaaagaccttttcctaagcagtatttgatactaggaattgaatgtctttctattaaggtaacatttttggaaaaagctaatttttaggccaggcgtggtggctcacgcctataatcccagtactttgggaagccgaggtgggtggatcacctgaggtccggccaacgtggcgaaacccagtccctattaaaaatacaaaaattaactaggcatggtggtgcacacctgtagtcccagctacttaggaggctgaggtaggagaatcgtttgaatctgggaggcagaagttgcagtgaactgagattgcgccactgcactctagtctgggtgacagagcaagactctgtctcaaaaaaaaaaaaaaaaaaaaaaaaaaagctgatttttagacatgtctctattagagacaaaattattcatttaattccgggatttgtagtcattttggaactttgctgctacttaattgctaaatgactaatgggaataaagggatgtcttagaatcattaccatcctttggtgcaatcattactagactataatgcccgtttatagttttttttggtgggggacagggtctcgctctgttgcccaggctggagtacagtggcgcgatcatggctcgctgcagcttcagcttcctgggctcaggtgatccacctcagcctcccgagtagttggaaccacaggcatagcatacgccaccgtgtccaactaattttttttttttttttttttttgtgacagagtctcgctctgtcgtccaggctggagtgcagtggcgcaatctcggctcactgcaagctctgcctcccgggttcatgccattctcctgcctcagcctcctgagtagctgggactacaggcacctgccaccatgcccggctaatttttttttgtatttttagtagagacggggtttcactgtgttagccaggatggtctcggtctcctgacctcgtgatccgcccgtctcggcctcccaaagtgctgggattacaggcgtgagccaccgagcctggcctaattttggtattttttatagaggtggagtttcgccctgttgttgaggctggtcttgaactcctgggctcaagcgatcctcttgcctttgtctcccaaagtgctgggattacggtgtgagccactgcgccctgccttttatagtcttaatgttaaaatttagcagcattttacatttcaaaactgaggcctaaaactttcaacctaacctaagtggtatctttcttagttacccttatattctatctggttatccagatgaatgtagagagaacttttagttccccatattcaattttgttttgttggcactttagattatcctgaagtcttttagtttcttgagtcttcgtttgttgtttgaagagggtttaacttggtaaccaggatctttaaattgggcacagaaagatatactggatggctggacaagataatgtatttctttgatgatcattactagatttactaattgctaacagttcatgaaggtttttttgcagtgtctagacaatgtcagcccaagagactgaaattctaaatgaacaaacactgagaaatatttgaagaattcattcagtaattacctatgtaacattcttgctaaaggtgtttaatttaagctgagcttagttatagtagacaatcagacaaatccagtttgtgggactttctacaagacagttggcctgaactctaaaaatttcaaagtggtgaaaacgaaacgaaacaaaaagggcaggaagactgttctagatgaaagaagttgaaagagaaatgacagtcaagtacagtgtcaagcctggattaagaaaacaaaaaaccatagaggacattttggggataactgggaaaatttgaatatggtgtatatattagacggtattataccttttttttgtttttttttttttttgagatggagtttcgctcttgttgcccaggctggaatgcaatagcgtgatctcggctcaccgcaacctctgcctgccgggttcaagcgattctcctgcctcagcctcccgagtagctgggattacaggcatgcaccaccgcactgggctaattttatatttttagtagagacgaggtttctccgtattggtcaggctggtctcgagctcccgacctcaggtgatctgcccacctcggcctcccaaagtgctgggattacaggtgtgagccaccgtgcctggcctatatcattgttaaatgtcttgaatgtgactatatggtattatggttatataggaaaatgatcttatttttaggcaatacctgatgaagtattagtatgttgaaatgtcgtgatttttgcaatttgcttttaaattgttcaaaaaaaaatcatttgtagagaaaaaagcgaaagtggcaaaacatttactatggtgaatctaggtaagagcatatgggtgttcattttatgattctttcactttttaaatagatttcagtttttcaaaatgtaaagttggggacagccaggcatggtggctctcgcctatagtcccagctgcttgggaggctgaagcgggaggattgcttgaggccaggagttccaaggcttcagtgaactatgattgcactactgtgttccagcttgggtgacacagtgagcacccatctctatttaaaaaagaaaaaaaagttagggagaaaaaaagtacaatgaagaaatggcttggctgggcgcagtggctcatgcctgtaatcccagtactttgggaggccaaggcggctggatcacttgagctcaggaattcgagactagcctggcaacatggtgaaaccccgtgtctacaaaaaatataaaaaattagccaggtgtggtggcctgcacctgtggacccagctacttgggaggctgaggtgggaggatcacctgagccaggaggtggaggttgcaggttgcagtgggccaagatagcgccacactccagcctgggtgactgagaccccatctcaaaaaaaaaaaaaaaaaaaaaaaaaggaaatgcctcaaaacagctacagctaggtttaggaaaggctgtcatcatatttgaggattccatagtgtcttaatgggggaaagctgaaaagaagaaaatgagccttaaagaatattatagctgatgtgaagtggaggcagcttgtttagcagaaaaagtagtggtttcagctgcatgatgggggttagaaaaacatacagaagtcagtatggagaaagaaaaggtacttaactaagaagtagagagaagatgggcaaactagaagggccagagaactgaaatacataaaatgaagaaaaagaagagggatagttgaaaactggtggagcagttgacatcaatttcattaatgggacagcaagactattttgatgactgttatttttttcttttcttttttttttttttttctgagacagagtctcgctgtcgcccgggctggaatgcagtggcgcaatctcggctcactgcaacctctgtctcccgggttcaagtgattatcctgcctcagcctcctgagtggctgggattacaggtgtgcgccaccacacccagctaatttttttttgtatttttagtagagaaggggtttcaccatgttggtcaggctggtcttgaactcctgaccttgtgatctgcccaccttggtctcccaaagtgctgggattacaggcgtgagccaccgcgcccggctgtgatgaccatgttttaaaaacccaaaacaaatagacttataaacctattctgaaatcatagaaaatccaaatattacccagacagttgatgtggaaagtggaatagctatgtttttaattttattgaagagattgaagtgaaaaaaggggtggtagtgggataaagtaaatattaacactaatgagtagaggagaaaaaaaggattttctaagtgtatttttcatccctgttaattgcaccactcacccatttagtcactgattcagatgaccagcctgggaatcaggccagactctttcttctccattttactgcatgtccagtcccaccagactaaatgctgtgaacctttggtttgtacatatcctctacttcatcctattctcacaccttttgcttgtgccattgcaggagcctcttgctgagactatgtagtctgtccacgctgtcatcgtgatctgtgaacaatatcaagggtcattcttgtgctcaaaatccttcatgagcacttcctgcctgtgggataaactctttgttgatgggcagtaccctgcatgctaaacctctctaggcttgtgttccatttcttcctcctcatttcacaaccctcatccccaacctactttatttttatttatttatttatttatttatttatttatttatttatttatttatttattgagacggagtctcgctctgtcacccaggctagagtgcagtggcgccaccacggctcactgaaagctccgcctccggattcacgccattctcctgcctcagcctcctgagtagctgggactacagccacgcgccaccacgcccggctaatttttctttttttttttttaatagagatggggtttcaccgtgttagccaagatagtcttgatttcctgagctcatgatctgcccaccacggcctcccaaagtgctgggattacaggcgtgagccaccgcacccggcccatttatttatttttgagacagagtctcactctgtctcccaggctggagtgcagtggcgccatcttggctcactgcaacctccgcctcccaggttcaagtgattctcctgccccagcctcccgagtagctgggattacaggtgcatgccaccacgcccagctagtttttgtatttttagtagtgatggggtttcaccatgttggccaggctggtctcaaacttctgacctcaggtgatctgccctcctcggcctcccaaagtgctgggattacaggcgtgagccactgtgtccggcccccagcctcctttaatactacaggttgagtgttcctaatccaaaatctgacattctccaaaatctgaagctttttgagtgccagatgacaccacaagtggacactttctttcctgacctcatgtgatgggttgtaatcaaaacctggggacataacccaaagttttttcagtgtccccaagggaaaaagaccctcccagcccccttcggttgtgatatatcttttccatgcacagcatgatggtgatgtccaggcaaccacagattgaccacgtaggtggctaagggtagtgacacatttgctttctaattcagtgtacgcaaatttattttgtgcacaaaattattaaaaatatttataaaattatcttcacattctgtgtatatgaaacataaatgaattttgtgtttggacttgggttccattcccaacacatctcattatgtatatgcaaatattcccaaatctgaaacaatctgaaattgaaatgcttctggtcctaagcactttgaataagaagtcatacttgtcgtcctagaatgttttatatctgtgaatgggctctttgcttctgtgcataatggttttttttttttttaacagttttagagataaggcctcactctgttgtctaggctggagtgcagtaatgcgatcaatgctcactgtggcctcaaacaaactcctggcctcaattgatcgtcctgcctcatccctctgagtagctgggactacaggcgtgtgctgccatgtctggctaaatgttttatttttattacttttttgtagtgacagggtcttgctatgttgcccagcctggtctcaaactcctggcctcaagtgttcctcccacctcccagagagctgggattacaggcatgagccactgtgcctggccctgcgtagaatcttgtccctcagcttgaccagctcctgtttgtttttcaagatttagccaaggggacttctgagaagctttttcttctctgctaagaagctgtggagagtaatggtttgagaacatgggcttcagtcagacatacctggattcaaatttctgtttgttttttttttcaaggagatggagtcttgctctgttagccggctgaagaagtgcagtggcaccatcatagctcactgcagcctcaaactcctgggctcaagtgattctcttgcctcattctcatgcctggcactacaagcatgtgctactatgcccagctcaaattcttttagtgatgcatgaccttagataaatcacttacacttgttttacctgcatttctttatgtgtagaagagggataatgaaacttgcagtggcaagcacatagtgagtactccatatatgttatggtaggtgctgctgccgccatcgctatcatcatcatcatcataagaattactgtctcctatgagctcccataaacaatctcattgctttgcaaatcgctttaaatattttcttgtcctttcttcacaataaactcctctctttaagggcaaccactgtatccttaatgctgaatgcagtgcttaacacacgcttaggtgcttagtaaatatttaagtatgtgcaagcataagaagcttattttatggatgacagtgtaagaaagagtacagactctgctgattaccagccgtgtggcctttgagctttgttatttattttccttgccacaggtgtaaaatgggagatagtgcctacctcagaatttaaagattacatctcatattgtatgtaaagtgcttagcataatgcccatagtgggtggttaataaatgttagctattatttaaaaaataaatcaatcttggatcttggcgagatttgacagtagatctattttactttaagtgacatgtgaaatgaagatttaagagtactgtattttatatagtcacgcttacatagttgcttaataattcggagttctgacaaatgcatccttaggcgatttcatcattatgcaaacattgtatagtgtacagttatcccttggtatatgtgagagcttagttccaggacccccacatataccaaaatccctgaatattcaagtccagaagttggccctgtggaacctgagaattcaaaaagttggccctctgtatttgcaggatggggttttgcagcctgtgtttggttgaaaacatttgcatataagtgaaccagtgcagttcaaacccatgttgtttgagttaaccatacttatacaaacctagatgttatatatatctacaaacgtagatgttacacacctaggctgtatggtatatagcctattgctcctaatctacaaacctgtgcagcatgttactctatttaatactgtaggcaactgtaacacaacagtaagtctttgggtatctaaacatatctaaacctagaaaaggtacagtaaaagtacagtattaaagataaaaaatggtccacctgtggagggcacttaacatgaatagggcttgcaggactggaaattgctctgggtgagtcagggagtatgtggtgagtgaatgtgaaggcctagggcattactgtagaacaccgcaggctttacaaacactgcacacttaggctatgctaaatttataaaatatttttcttcaatagtaaattagccttagcttactgtaacttttactttataaacttaaaaatttttaaactttttaactcttgtactcatacttagcttaaaacacaaacacatatagctgtacatattttctttcatatccttattcttataagcttttacgatttcaaacatttcttatttttaaaacttttttgttaaaaatgaacacacaccacatacattagctgaggcctccagagagtcaggatgatcaatgtcactgtcttctacctccacctcctgtcccactggaaggtcttcaggggaattaacaggcatggagcagtcacctcctatgacaacaatgccttctcatggaatacctcctgaaggacctgtctggggctgttttacagttaccttttttttgttgtttttgttttttgaataagtagaaggagtatactctaaagtaatgattaaaagggtggtatagtgaatgtataagccagtaacatatttgttatcgttatatgactggcagtgcagtaggtttgtttacaccggcagtaccacaaatgtgagtagtagtgccttatgccgtgatgttaagacaggtgaaaacatcactaggtgatagaaacttttcagctccattataatcttacaggatctctgtcatatatatatagtcttgtagactgaaatattgctatgtggcacatgactgttttctaactttagtcttagatattgaaaggatttaaggctgggcgcggtggctcacgcctgtaatcccagcactttgggaggccgaggcgggtggatcatgagttcaggagatcgagaccacggtgaaaccccatctctactaaaaatacaaaaaattagccgggcgcggtggtggacacctgtagtcccagctactcgggaggctaaggcaggagaatggcatgaacccgggaggcagagcttgcagtgagccgagattgcgccactgcactccagcctgggcgacagagtgagactccatctcaaaaaaaaaaaaaaaaaaagaaagaaaggacttaaacctaaaatgcttaagaagaaaaatgatgaaattttccttttctatagtatagatagaattttggaagtgatgtattcataaatatttgatgagttcctattacatggagcacatttctggttatgcttagaagggttaaatactacttgaaaagtactcatgcggtgtagcatataatagcctctcaaaaatgtcacagaaatttagaactatatagtgacctatgactaatcccactgcaaaaggagcaggtgactaaattgtagacaatacctggtgtgaaatgtttgttcccttgatctataaattgataatcctttaatgtttaatctgactgtgactagtggcctgaagaggtaagacttttgtgtttttttatgtgtgtgcctacgtatgtttttttcttgtgacctaaggctttgtggaagtttaaaatagagtgattttaatgaatggctggagtaataaagatagttggtgggcttctccatggaagcaagttggttatttttaactactttgcactgctttatggaaaacatatgccactatagaagttattgtttctgttgactgtgactggtggtggttattacttagttggttctaggagggccagtttttagctaatactttgaaagtgagttctgtgactattattacttagttggttctaggagggccagtttttagctaatactttgaaagtgagttctgtgactattattacttagttggttctaggagggccagtttttagctaatactttgaaagtgagttctgtgactatcaaagaccagaggaataatctcaaagaagctgatcagatcatggaactaaagtcacttgttctggtgaggaacagttgaaagggcacataatacttttggtaataatatttaatgtaacttatttagcagtgcgtgttcatgattggcaaggcaggtgagtagattaggaaatgagtctgaaaaagtagggcaggactgctggcttaaaataggagtgaaagcagtgaacagacatagctatttaggcaaatcctagtgtcccatgaggataagactaccacaataatctaaaaataatagcttataggccaataacctttaaggtttatgtttcatactcaccgcaggtcaacccatgtggctgtttctcatttatgcagatctacatcagattttacttgtgtttacctgaaaatacatattgtttatgtagtcaatgtatattgtagtagcatacagaatctgatcttgaaaaggttgcagaatttcttgagtgtactttaggaacttagtttttcaaaatttatttaatttttattttgataattatagattcacaggaggttgtaaataaagaaatgtaaagggaggtcccaaacacctctcccctaactcccttccctctctttgcccgtgtcagtatcccacaccaccacacacagtagtataccaaaaccaggaaattgacattggtacagtccatagagcttgttcagatttcaccagttatacatgcattcctgtctgtgtatgtgtgtttagctttacacaatttcacatataggtagcataactaccagcacaataagggtactcaacagtaccgtaaccacaagatttagttacttcccctgtatagctacaccagtcccccttctccacgggaaactcagttttatagtttggctattgtttttaatcatgtgcaaacctggtttgattaaggtttttgcttctgatttggaagcattgttaaataatttttaatgaaatacaggtaatctgaaagcagctgacacatggtaaaaagctagatttgggaacactgaaagacttcttggatgcataggcttagaatgattctcagctgtgatttatttcctccctccctccctccctccctccctccctcccttcctcccttcctcccttcctccctcccttccttcccctccctccctccctccctccttccctccctccttccttccctccttccccctccatcccttcccctctctcaatattctgtaatattgaaatatttcgttaaaaatatacagcatattacatatatatctgaaattttctcctttcttccttttagtataccttctatttattttggtaccaagaatagagtgctgctgtaacaaacacctaaaagtgtggaagtggctttggaacttctgaaagacccagcccaagtcccatcttcatttatttatttatttatttttaagaattttttttccaaggctggatctcggctcactgcaacctccgcctcctaggttcaagtgattctcctgcctcagcctctggagtagctgggactacaggtgcacaccaccatgcccgactaatttttgtggtttttagtagagatagggagggtttcacgatgttggccaggctgctcttgaactccaggcctcaagcgatccatctgcttcatcctcccaaagttctggaattacaggcatgagccactgcacccagcccaagtctcaactttctcatacacttaattgatttctgtagctatcgttgatttccccctttataatcttccgtacttacagtctgaaccatacaatgtactgcttaactattctgtgtttatatcttgttttatgcgaattctactcaactagagcatatgattcttcaaggtagaataaatgtgttaaacttgtatatttcggccgggcgcagtggcttacgcctgtaatcccagcactttgggaggccaaggcgggcggatcacctgaggtcaggagttcgagatcagcctgggcaacacggtgaaaccccgtctctactaaaaatacaaaattagccaggcgtggtggcacatgcctgtaatcccagctactcaggaggctgaggcaggagaaccgcttgaacctgggaggcagaggatgcagtgagccgagatcgtgccattgcactccagcctgggcaacaagagtaaatctccgtcgcaccaaaaaacaaaaaaaacaaaaaaaacacacaaaaacaacttgtatatttcacacattacccatacaatgtgagcatgtagtaggtaccagataaacatttagttatttaactagaatataattactgctctagtattttttccctagcactttcaaacgttactcaaagaatccttctagctctttgatacaaattttagaacttcactattaacaaatatcagctgggctcggtggctcacgcctgtaatcctagcactttgggaggccgaggcaggcggattgcttgaggtcaggaatttgagatcagcctgaccaacatggtgaaaccttgtctctactaagaatacaaaaattagctggccgtggtggttctcaactgtaatcctagctacttgggaggctgagacaggagaattgcttgaacctgagaggcagaggttgcagtgagctgagatcatgccactgcattccagcctgggcaacagagcgagacaccgtctcaaaaaaaataaaaataaaaataaaaataaataaataaaataaagtaaaataaaaatatatatatatcactactagctaggattttaggaaggctacctatagaaacttagatatatttagttatggaatgttttgtttttcagttggtaatgtacactctttcagtgtttcaaaggaggatactggataattcgatttgaattgtaaatctccccaactggtgttggagaaaccagaggagttgatgattttatacacagtctttcctacctcttattattgagaaaagagtgttaattgtggtcaatgaatttcttcaaagtttgctgcttttaaatcaaattaaggaagtcagcaactataagtagaatgatatgaataaaatgtttcattgttatgaagaagtgttagtagcacgtggcattatgtgtttcacatattgaagttgacaccagaaatatacatttgtaattttttttttttttctgagacagagtctagcactgctgcccaggctggagtatagtggtgcagtcatagctcactgcagcctggaactcctgggcccaagtgatcgttccgcctccacctacacctcccaagtagctggaattacaggcacatgccactgtgcccagaccattttagtgatttgttattttttaaatctctattctctttttaatacagagctgcaaatttcttacttttctttagtgcaatccatgtgtgaaatatgtgttataatttgtaactaacaatatttgaagtcctgaagtttttgaatgatcttgtatgtaagattagagtagattcatggttcccactaataaccacttcattattatcactttgttatgtgtgtgtgtgtgtgtgtgtttaaagagataaacttataggtggtttatctagaattgtgtaaaatactttcattttcatgagagagtatcttgcatgtgagtattatttgtcacatgttatgcctacattgttggttggacttaaactttagtgacctctcagagattattttcattctagttcatgtcatattactttgatatatgtattaagaagaagtacaagagattatttaatgctattgtctgaatgtttgtgaccccccagaatttgtatgttgaaatcctaatccccaatgtaatggtattaggaggtatggtcttggggaggtgaagtttttataaatttctaaaagaaagtataggaaaaatctttgtgactttggggtagactattttcttagataggtcatagaaggcatgaaccataaacgctgacaattggacttttgaaaaattgttcttctaaagatgtttaagaaaatgaagaggcaagccacagaatgggagaaaatatctatactgcattagtggagtttactactaaattaagaaaacattagaagattgtctatatagtataactgattataaaataatgtatttacatatttaaaatattaagatatatactgacatcttaacagtagttgtctttggctggtgagattctaagagttttgtttttgtggtggttattgttttttgttttgtgctcttttaaaaaattgttttgcctcaagtgtatagtatctttgatttataaaaatctttaaataaagataggatagtttgaaagattagcagaatgtttacaatcaatacttgatactacatggataatactttcctattctatttttgtaaattctgtgcttgaaaatttcaaagaattttttgtgtgtgagtgtgtgttttgaggtggagtctcgctatgttgcccaggctggtctcaaactcctgtcctcaagtgattttcccatcttggccccctgtagcattgagattacaagcatgagccaccattcccaggccaaaactttcgaaactttaaaaaatagcatgaaaacctttattttagtccaggtgcaatggctcacatctgtaaacctggcactttgggaggctgaggtgggagaactgcttgaagccaggagtttgagaccagcctgggcaacatgatgacacctgtctctacagaaaatttaaaaattagtcaggtgtcatggtgcatatctgaagtcccagctactctggaagctgaggtgagaggattgcttgaggagttcgaggctaccgtgaggcatgatcaagcagctgcacaccatccagcctgagtgacagagtgagagaccctgtgtctaaaaatgaaaaaagaaaatctttactttatttatttattttttgagatagagtcttgctcagttgcccaggctggagtgcagtggtgtgatctcggctcactgcaacctccacctcccaggttcaagtgattctcctgccttagcctcccgagtagctggaactacaggtgtctaccaccatgcccggctaatttttgtgtttttaatagaaacaggatttcaccatattggccaggctggtcacgaactcctgaccttgttatccgcccaccttggcctcccaaagtgctaggattacaggcgtgagccaccgcacccagctgaaaatctttactttatttacagcactttgtgagccatatttagcaaacatagttccacatatgaagtttgtttttaatgataaggggtttttaaacttgatttttagtataaatacacagtataataaaagtttgtttacattagatatgaagctaattaccacccctaactgctggctggttttctagaattgtagaagcaggtggtgaattttcctgtctgctgatatccaaaacactctgattcctgggtaagttccagcagtattggatgttggtaatattactgttggtcgattaatttatgatagtattatatacatctctaaagtctaattctatgtattttttaagtaaatagtagaataacatggcataacattttaaaaggtatgtggtaaaaagtcttcctattcctaactgtcagccaccagtttcctgccatgggactgttaaatctcaccaccaaagaccaccaagaaaacatctgtagtcaaaaataagttacactgatttagcttgctgcaggaaggaataacatacatcagaagagctgtgggacctctcaaaaggatagagttaggaaagaggacatacaggattttaggagctgttagtcacagagtaatgttaggataaaggtagtagtctgggcagggattggctagaatatgtaatttgagtgagttgctggaacagccagtagttttgcctctaggacacataagtccctgaggatttactgttagatcagtttgtggtactagaacatacgggtatgagtgagctgatattaataaaggtttgaggctgggcacagtggctcacacctttaatcccagtgcattgggagtctaggatgggaggatcgcatgaggccaggagtttgagactagcctgtttaacttagtgagacctcagtctttaaaaaaatttttttaaaattaaaattaactgagtgtggtggcacacacctgtagtcttaggtacttgggaggctgagggggaggatcacttgaactcaagagttggagactgcagtgagctatgatcatgccactgcaccccagcctgggtgacagagggagaccctctctcttaaaaagaaaaaaaataaggtttgagcttagatggcctgtgatgcacagtacattgcggtttggtttggttcagtttatctgttttgcaagtactaagtgcttttctgtgcatctgcaagcaatttgtagtgtaatttcagttttgtttcactttttaatctctgtttctgatcattcgtccgctaaactggaacatttaccatttaggggaggtgatcaatcaagatttcaaactgtcgtttgatgggttgtgaatgtttataaagctttgatggtagacattttggcctctacaggcaccaggccattttgttcttttttttcttttttctttttttttttttgagacggagtcttgctctgttgcccaggctggagtgcggtggcacgatctcggctcactgcaagctccgcctcctgagttcacaccattctcctgcctcagcctcctgagtagctgggactacaggcacccgccaccatgccaggctaatttttgtatttttagtagggacggggtttcaccatgttagccaggatggcctcgatgttctttttcttagatgataatttgttgaatcagctggtgtgacagtggctgcacagcagcatttaagactctaaagatcacacacttggcatctgcaacacactgaaactcagacagttattattaaagtttaaaataatgtcccatatatcccataatctatttggattttcctttgggcaaccaaatatattttttttcctttaatttggatatgggtcattcacctttgcaactgtcccatatttggtttatattttgccaaggataagcatcttgatagtgctaacagtaaggaaaagttatctgttagcagcctaaaatcttacaacagtggagagagaagaaaatgccaagagaataaaggacaaaatcatgcaagtctgtagtcatcagtggcttctggcatctgggaggttgtgttctgattatcttggacataaatagtctattcattttatcttctgcttctggaccataacagttctggaaatcttggctcacccactgtttgtccatggcaatgatgtcggcagtatgcatcattaatttattctctgtagtgtcagtaatgggtgcatgatacaaacatttacaaaagttcttttgataagtcttccacaaggctcaattcctatctttagcttatagccaggaactttagatgaatgtaaggaagaagcggaaaccacctgtggatcatgggactataggctttagttgatttattatattaaccagcattatcagaatggaagggagtggaatcttctattgcagaaagtacataatgaattttatgagtagtcactgattatcctagaagtaagaatatctcacaaacagggaggacattgacagtctctaggactttctttcatttatcctataaagtgtattatgagtttcaccattccaagtttactgaaacctagaaataaaatccttttttagatagctattgtggcagtctttgtactcgaatgtatgttttcttttttttttttttgagacgaagtttctctcttgtttcccaggctggagtgcaatggcatgatctcggctcactgcaacctccgcctcctggattcaagcaattctcctgcctcagccttccaagtagctgggattacaggtgtccaccaccaaaccccgctaattttttgtatttttaagagagatggggtttcaccatgttggtcaggctggtctcgaactcctgacctcaggtgatctgcctacctcggcctcctaatattttctttaagccgaaagatacttaaatgttgaagtatatttattttaaccacattttattatacatgattaaattgggaaggcttaactttccttatgatttgtgaggtttttttttccctttaacccaaatttaataaagcaaagagttctcacaaaagttttaagttaattaaaattcagagtatgccaaacaaagctaataatttttataatcctttaaaaaatttttaataaagtaaaggactaaagctttgttttacctagtggccatttattataaacccaaagatgtagtaggtgtaaaagacatcttaacaatttcttattatttacttattttttagagacagggtctcgctcagctgtctaggctggagtgcagtggctggatcatagctcactgcagcctcaatctcctgggctcaagtgattttcctgcctcagcctcctgagcagctgggactataggtgtgcaccaccacactcaactaatttttgtgtttttttggtagagacagagtttcgccatgttgcgcaggctggtctcgaactcctgagctcaagcaatccacccacctcagcctcccagagtgatgagattctttttataggtgtgagtcatcatacctggactactttttgctttttgactgatgattccaagagccttttcagtgtttagcacatagacgtagatagttgtagtctttacttaagtttgaatgaagtgagttatgcgtgggctgagttcactcaaagcttgcctcagctgggattattgaccatatacccactttactggagaatgagtatgccaagagaccgaggcagaatctgcaaaatcacttctgctgcaatgtatttgttaaagcaggtcactaaggccagttcagattctacgggagagacattagactctccctttttttttttttttttgtcacctaggctggaatgcagtggtgctatcttggctcactgcagcctcgacttcctgggctcaagtgatcctcccacctcagccgcccaagtagctgggactccaggcttgtgacaccacattcggctaatttttgttgtgtttttagtagagacggggtttcaccatgttgcccaggctggactcaaactcctgagctcaagcattctgcctggctcagcctgccaaagtgctaggattacaggcatgagccactgggcctggccttagactctacttcttgataggatagggtcaggtcactgctatgctttaaatatgatccccagaaagcatatgttggctgcctgggtgatgggtatactagaagcccaaactttaccattatgcagtatatccatgtaaaaaaggtacacatataccccttgaatctgaaatttaaaaataaaataagtatgtattagaaaatttatcccaaatgcagtagtgtcgggaggtggggcctaatgagaggtgtttaggtcatgaagccacctctaatgaatgcattaatgttgattataaaagggcttaaggctgcaagttctatctcttgctctctcttatccctctttgcccttccactatgggatgatgcagcaagaagacccatgccagatgcctggcccctcaatcttgaacttcttagcctccagaactatgaatgagtaaatttctattcattataaattatccagtctataatattttgtcatagcaacacaaaacagaccaagacagtgagattacagaagagtatgtagagtgagaaatattattgtagccatttttttttagtttttgctttttttaaaaaattattctttaagttctagggtacatgtgctcaacatgcaggtttgctacataggtatacatgtgccatgttggtttgctgcacccaccaactcatcatttacattaggtatttctcctaatgctctccctcccccagccccccatcctccgaccagccccagtgtgtgatgttccccaccctgtgtccatgtgatctcattgttcaattcccacccaagagtgagaacatgtggtgtttggttttctgtccttgtgatagtttgctgagaatgatggtttccagcttcatccatgtccctgcaaaggacatgaactcatcctttttatggctgcatagtattccatggtctatatgtgccacgttttctttatccagtctatcattgatggacatttgggttggttccaagtctttgctattgtgagcagtgctgcaataaacatacgtgcacatgtgtctttatagtagaatgatttataatcctttgagtatatgcctagtaatgggattgctgggtcaaatggtatttctagttctagatccttgaggaatcaccacactgtcttccacagtggttgaactgatttacacacccaccaacggtgtatttctccacatcctctccagcatctgttgtttcctgactttttaatgatcaccattctaactggtgtgagatggtatcttattgtggttttgatttgcatttctctgatgaccagtgatgatgagcatttttgcatatgtctgttggctgcataaatgtcttcttttgagaagtgtctgttcatatcctttgcccactttctgatggggttgtttttttcttgtaaatttgtttaagttctttgtagattctggatattagccctttgtcagatgggtagattgcaaaaattttttctgtttttgctttttgagatggagtctcactctgttgtccaggctgacgactgtagctgactgcagcctcaacctattgggttccagagatccttctgtgtcagcctcctgagtagctgggagtacaggcagatgccaccacacctggataatttaaaaaaaaaattttgtagagatgggggtctcaccatgctgcccaggctggtttcgaactcttggcttcaagcagtctccccaacttggattcccaaagtgctgggattacaggagtgagtcaccatgcctggctggttgcagccagttttggaaaataaaatgtgctacagacattgtaagggcaaaatatttaacaataactgagatttctaaaaattgcagattggctaaatgttaataaattatgatctaagtaaattatatctacctaggagaaaataaaaaaaaatttatggtattttaaggtatttatttatgtacttatgcattgagatatttgccatcaaaatttttactagtgcgtataagtacctaacacatagtagcaattcaataaaattatttgaatgaattaattgaggatacttttcgatcatagtttttatggtgagagttttcattttgttctgtcttatttttatgtgtattttagttagatgttcgcttagtctattcaagatgtgttttttgtttgtttgtttgttttgagacagagcattgctctgtcgcccaggttggagtttcagtggtgcgatctcagctcactgcaacctccacttcctgggttcaagtgattctcctgcttcagcctcctgaggcaagcacgcgccaccacacccggctaattttttatttttagtagagatagggtttcaccatgttggtcaggctggttttgaactcgaccttatgatccacctgcctccgcctcccaatgttctgggattacaggtgtgagccaccgcccccggcctgttcaagatgttataacaaaatgccttagactgggtaatttgtgaacaacagaaatttatttcttacagtcctagaggctgggaagtccaagagtcagcttgccagcagattgtgtgtctggtgagggcctcttccttataagtggcaccttctatgtgtcctcacgtggcagaagggacaaacaagctcctttggacctcttttgtaatggcacaaatgccattcatgagggcagagtccttacgacctaataatttcccagatattccacgtcttaataccaccatgttggggattaggttttacctatgaatttttggaacattcaaatcatagcagctgttaagaaatgttgaatcagaagtttctagtcattcttttttttgtttttttgaggcagagtcttgctctgtcgcccaggctggagtgcagtggtgcaatctcggctcactgcaacctctgcctcccgggttcaagtgactaccctgtctcagcctcccgagtagctgggattacaggcgcccgctaccacgcccagctaacttttgtatttttggtagaggcaagagtgtcaccatgttggccaggctggtctcaaactcctgacctcaggtgatctgcctaccttggcctcccgaagtgctgtgattacaggcgtgagccactgcacctggccagaagttgctagtcattctaaactggaagcttgacataatattttgaatcaagcattttaaaaatgtctgcttttcataaatagtttatttttacatatttatccctttcatttaggaaagaagattcatgagttttttttttaatcagctggcaaattagagaaaatatttatacagcttctaataggcatctcaaattattttgaaacattgggaatatatcttttgtaatgttttgcttgtaataattgaatagattttctcatttggtaataacttggaaaatacaaagtggcccatttaaaatggactctgatttaaaggtactgttggaggcattggtgacgggccatttttccttttaaatagagaaagtatgacaatctattttcaagaaactgccatagcaatatttttagtctcatatgctcgcacagaattttgtcactccccaccagtaggtggaatctatttccactcttcttgaacctgggcaggcttgtgactgttcaaccaattgaatatggtggaaataatgtgatgggatttctgaggccatgatataaataggatacaactgatccagcaatcgcactactgagtatctacccaaaggaaaataaatcaacatgtttattgcagtactattcacaacagcaaagatacagaatcagcgttgagtatctattagtggatgaatggataaagaaaatatggtatatatacacaatggaatattgttcaaccataaaaaaacaaaacaaaataatgtcacttacagcaacatggatggaactgaaggtcattatcttaagttaaataagctaggcacaaaaagacaaatatcatatattctcacttatatgtgggagctaaaaatttgaacacatggaggtagagaatggaaaatagataagagagactgggaagggtgagtgggggaaaggggaaggatgaagagaagtgagttaaagggtacaaacatacattaagataggagtagattcaatgtttgatagcagagcaggatgactatacctaacaaaaatgtattgtacctggtgatgaacatcctgaagaccctggcttaatactatgcataatatacatgtaacataattcctcatgtaatctgtaaatttgcacaaataaaaagagggaaaaaaaaaagctacagcttcttcctggctctctctttgtcttgggatgcttgttgttggaactaagtcatacgaagaggccacatgtgggtattctcttcaaaaacctgagctaagctgcagccaacagccagtattaaccacagtatgagtgagaaagctttcaggtaattccagccccaggttgtcgagtatcctgctgaggccccagaagttgcggagcagagacaagccagccccactgtgccctgtctgaatttatggtccacagaacctgtgatagataataagtgattattgccttaagccactaagttttggggtaatttgttacatggcagtagataattcatataatttctagaaacttatagggaaataaagatttgctcaaagacatatatatatatatatatgtgatatataaatgatccatgtatatatatatgatatgggtgatatatataaaataaatatgggtgatatatatatatacacacacacacacacacacacacacatacatatatatatgttctctgctgtatcatttatttatgttttcttttttttagaggcagaatctcactctgtcacccaggctagagtacagtggctcagtcataggtcactgcagccttgaactcctgggctcaagcgttcctcctgccatagcctcccaaagcactgggattataggtgtgagccacgatgcctggccctgcagtataatttacaattttttgaaatagtctagctatccaacaataagaaaatgtttaaataaattatcataagcacactattttcctaagtaaaatttctacattttctatattcaaaaacaaagtttaaagaattggtatatagtcaattatgtcataatgataaacctaattgaattatatatttacataaataaagatcattaagaacaaaaaaggctttacatctgataaaggacatgtacccagaacatacaagaactttcgtcagtcaataagaaaagatactaaatgttttaaatggacaaaagaattgaacaagcacatccccaaagaagatattcaaatggcccttaagcaagtagaaaggtcctcaacatcactactcatcagggaaatgcaaagtagagaacaaagagataccggtagacgttcactgtactggaataaaatttagcagatgagcaatattgagtgttgacaaggatatgaagtaactggaacccttacaccttgatggtgtgagggtaaatggtatcactttgtgaactgttgggtaaaaccaatgttgaccccataaactttcagtcccattcttgggtatatacctaagagaaaagagtgcttatgtccaccaaagcacacatagaattatattcatagcaactgtattcataatggctcaaattggaaagctgctctagtcatacattgtctgcccttacctttattaacgcagtagtgcttagcatgtagctacctgtgtttagtttaatatgtattattaatgaaaatttatttaggggatttcacccccaattttttaactttatggtttcaaatttcttaaaacctttctctttacatcagtttggttttggaagactaaaagaaagagcttgttgcacagatggcccaaagcacaaattattaaaatgctaacttttatctacatccagctccaaatattcccttactccttgatcattcttttttttttttttttttgagactgagtctgtgtcacctaggctggagtgatagatgtatatatggtcccctattctaaggtaatacagtcatgcatccgagaaatgtgtcatgagatgactttgtcattgtgagaacaccatggaatgtacttacagaaacctggatggtgtaactgctatacacctagatggtgtaactactactatgcatagtctatatgatatagcctattacttctaggccacaaacctgtacagcaggttactgtactggatactgtaggcagttataacacagtgctaagtatttgagtatctgaacatatctaaacatagagaaggtacaataaaaacacagtataaaaggcaaaaactggtacacctgtatagggcacttaaccatgaatggggcttacaggactggaagttgctctgggtgagtcggaggtgaatgatgagtgaatgtgagggcctaggacattattgtacactactggagactttataaactttataaacactgaacacttaggctacactaaatttaaaacaaatttttcttggctgggcatggtggctcactcctgtaatcccagcactttgggatgctgaggtcggcagatcacttgagtccaggagttcaagaccagtctggggagcgtggcaaaaccccatctctacaaaaaatacaaaaattagccaggcatggtggcgcacacctgtagtcccagctgaggactgggaggctgaggtgagaggatcatttgagccaggaggttgaaggtgcagtgagccatggtagtgccattgcactcccatctgggcaataaagcgagatcctatctcaaaaacaaattttttttctttaataatatattaaacttagcttactgttaagtttttactttataaatgtttcagtttttaaaaacttttggacttttttgtaataacacctagcttaaaagacaagtacattgtatagctatagaaaataatttttctttatatctttataggctttttctatttaaaaagtttaaatttttttttaacttttagaatattttggtaaaaatgaacacacacacacacacacacacacacacacacacacacacacactgagcctaggtctacacagggtcaggatcatgaatatccctggcttgcccccctacatctttatccactggcacaccttcaggagcagtaacaggcatggagctgttatctcctaggataacaataccttcttctggaagtcctcctgaaggacctgcctgaggctcttgaggagatgtcactcttttcagaaatttgcccatggtgttttgcttggtttatttctatttttcattgtagatttgtttgtaagcagttaatgcagcatgaacattcctgtgtattaatgaaaacctttctgtttttgggggtccatgttttcacacttcctaaggagtttgttgaggtgtgcaaaagcttctcccaaacccttcactgtgagttttgttgggggttctttttctttctccagcaaacttccttctctcttgctgcttcttcagctttgcattcctattccagttcccactcattagtcaattcctgcgatgttattgtggctataacgttactagatgacaggagtttttcagctccatttaactacagtccattgttgaccaaaacatcattttgtggcacacaactgtatttagctattttagtggttgggtagctgctatcgttttttcagtgaaatttgagtagttaaaatgagtcaagtagtagctgaaagcatgacgaaacttataataggactttctttacttgtaaatgatacaatatggtatggctagattaagtcttttaaaaatactcatagatttcaacttggttccataaagctggaagtggaaacattggacatatatcagaaattcaattgaacgcctccttttaaatttatggtttacagacttgtggctcttagatcccaggggatctaaagtagactgtgttataaagtaggcacataacaagacaacagccaatttaaaaatattaaatgaacttgctaattctccatgatattatatatataaactttgtacctaatgtaaactgaaggtagttattagcatttccaggttagaaaacataactggacttcccttatccactttttttttttttgaaacggagtcttgctctgtcgcccaggctgaagtgcagtgtcacaatctcggctcactgcaacctccatctcccagattcaagcaattcttctgcctcagcctcccaggtagctgggattacaggtgtgtgccatcacacccggctaatttttgtatttttagtaaagacagggtttcaccatgttggccaggctggttttgaactcccgacctcaggtgatccacctaccttggcctcccaaggtgctgggattacaagcgtgagccacaccacacccggccccttatccattcttttatgctctgttactacagcaaattattctcagacatagctccatcttggtagtagtgttcttgttattatcagtaacaaagtacattaagctactgccttttgttttattctgttttgttttgttttattttgagacagtgtcttgctctgttgcccaggctggagttcagtggcgcgatctcagctcactgcaacctctgcctcccacgttcaagcgattcttctgcctcagcttcccgagtagctgggattatgggcacttgtcactacacctggctaatttttgtatttttagtagaggtggagttttgccatgttgcccaggctggtcttgaactcctgacctcaagtgatctgcctgcctcagcctcccaaagtgctgggattacaggcgtgagccatggtgcccggccgagacttctaaaacataggtgtcattaggacagttctataggagaaataaatgccattttagtattatgactacttttctttcattttctttaaccatagtttcatttttaacacctgttctatagatagaaaaacaaagatactcatgtcatctagtgtcttgtctcatttataacttgttccctgaatcagcttcaagtctttcatgtttatgtgtaaaacatagggctgggcgcagtggctcactcctgtaatcccagcactttgggaggccgaggcaggtggatcacctgaggtcaggagttcgagagcaggctggccaacatggtgaaaccctgtgtctactaaaaatgcaaaaattagccaggtgtggtggcatgcttctgtaatcccagctactcagaaggctgagacagaagaatcgcttgaactcaggaggcggaggttgcagtgagctgagatcgtgtcactgcattccagcctgggttgacagagcaagcctccatctcaaaaaaacaaacaacaaaaaccattataatttatgcacacacaaatatttaaaatgactgtcacctttttatacttagaattgatcatttatgatacatagtatcttagaattttttccccacgtactggtgctgtggatgtgaaatcatggtgatttattaggtttaatttgtcatgtaaaagaattgtgttctgtttgttctctatacatttaaatattttaaattattattattatttttttgtagctgtcccctttcctccaacccaacggcttactttcaaggaagtatttgagaatgggaaacctaaagttgatgttttaaaaaaccatttggtaaaggaaggacgactggaagaggaagtagccttaaagataatcaatgatggggctgccatcctgaggcaagagaagactatgatagaagtagatgctccaatcacaggtataaaaagtctttgcatgatacttttttacagtatagatttgcatgagcagttttgagaaataattacaaataaccagctaaaaagtggtgtggtaatttttctagaaattatgagacagtcaggattggttaggatatttgttgttaattgaagaaatacaattttaagtgtctcatatttccagtagaactatttagtatgagtagattgactacagttttacagcagtcctgtcaaaagctggagtgatttaagttagaagttaaactgtgatcccttttggtgtaatgcccttcgtcttctaaggtataatttctcacatcactttatgctttttttcctagtatgtggtgatattcatggacaattctttgacctaatgaagttatttgaagttggaggatcacctagtaacacacgctacctctttctgggtgactatgtggacagaggctatttcagtatagaggtaaaaattaaactggatatgttgggactattatattgtctttcaaaaaagatgatttccattcttcagtagaagaaattaaaatgagaactctggcagaatttataaactttgttactttcaaaattaaagtagtagaaatgttttaattgatagaacagttattccttttttaaaaccagtcgaaaatctgacaaataggctatatattaatattaacccaattttacaaatagttaaatgttcaccaacttttcctcttgaagatagtatacaggattgtataaaaatgacataaattgctgttcaccctaaatggggtttagattagctgaccttaattataagaccataagctgctgagctacaattaacacttagattaactgccagtgctaaataaacactaagctttttgtaggaataatgtctggtactggtacacatagtaagcacttaataaatgttcactgaaggggaaaaatgagttgtagttaattaaaacttatactttccttttatatattttgaaaatggaaagataggaacatgtttagaattaaatagaagctttaatgtgtaaaagataaaactactttagaactttatgcaaggacttgagtacagtggaaccacagcacattcctagttaatgttcattgattcaactctacatgctggcaaataaaagagaaaaaaacttttgaaatagcgtgggtaataggatttgtaatgtgaccaagaataagcatgagctgagaaattgagtctgctttctgtcttgctgtctatagtcctgcctgccctcattgtgtgagaatctcactgtactaagtgtgtttctggtggttaaaggtttattgtcttgcagcctcactcctaaatgcaagtcagctctctcacctgatgcccaagcaaaggagcagcagttgctctattgctgtagaaaaaataagcaaaaaaatggatttttagttttctgttagataggcaatctaaattcatgaatcagaaaagttcaatgttggccaggcacggtggctcacgcctgtaatcccagcactttgggaggccgaggcaggcagattacgaagtcaggagatcaagaccatccttggtaacatggtgaaacgccgtctctactaaaaatacaaaaaattagccgggtgtgtaggcaggcacctgtagtcccagctacttgggaggctgaggcaggagaatggcgtgaacctgggagacggagcttgcagtgagctgagatcacgcctctgcactccagcctgggcgacagagcgagactctgtctcaaaaaaaaaaaaaaaaaagttcaatgttagttgccagtgcacaaaattcatttagtgtcaaatgtgaggacaaaagttaaaggtataaactgacaaaatagtaaagcccatttttccttctgctccgtaaatgtccaaggtctctaaataggtactgggaataggcggagattatccttgcagactgtatcattgaggagcttccctgttgccactcatatcatgcatgtttcagtagacataagtcaaatgtatggatgtggggctgcgcgcaatggctcatgcctgtaatcccagcactttgggaggccgaggtgggtggatcacctgaggtcaggagttcgagaccagcctggccaacatggtgaaaccccatctctactaaaaatacgaaagtttaccaggcatggtggtgggcgcctgtaatcccagctacttgagaggctgaggcaggataatcacttgaacctgggaggcagaggttgcagtgggctattgtgccgctacactccagcctgggtgacagagcaagactctgtctcaaaaaaaaaaaagaaagaaagaaagaaagtatggatgttagaaagacacattgagttcagtttatttctttgtgtttttgctagcatgagaaggtttcagacggtaaagattagaagaatacaaaaattactgaatttctaattaggcattttattttattttatttttttagagatggggtcctgccatgttgcctaggctggagtgcagtggctatacacaggtgcgatcatttcgtacctcagcctccaactcctggattcaagccatcctcctgcctcagcttcctgagtatatggaactatagatgcacaccactgtgcctggctagtcattgtatttaataaaacaacttttaaaatatttatttatttatttatttatttattttttgagacagagtttcgcttttgttgcccaggctagagtgcaatggcacgatctcggcccaccgcaacgtccgcctcccaggttcaaatgattcttctgcctcagcctcccaagtagttgggattacaggcacctgccaccacgtctggctaattttttgtatttttagtagagacggggtttcaccatcttggccaggctggtcttgaactgctgacctcgtggtccacccaccttggcctcccaaagtgctaggattacaggtgtgagccactgcgcctggcaataaaacaacttttttttttgagatggagtcttgctctgttgccctggctggagtgcagtggcacgatcttggctcagtgcaacctatgcctcctgggttttaagcagttctctgcctctgcctcctgagtagctgggattacaggtgcttgccaccacacccggctaatttctgtatttttagtagagatggggtttcaccatcttggccaggctggtcttggactcctgaactcgttatccacccaccttggccttccaaagtgttgggattacaggcatgagccaccgcgcccagcctaaaacaactttttagtgataaattattatgccaaattatcttctgattaactcgtataacttaaaatagctttaaaatagttttaattcattaatacattcaataaagcacatagaaaatatcaacaatgattttgtgcacagacatcatgttcagaatattttgtgttatgcatttttttcctcactcatcaataaagtttcttgagtgccaactttatgggcaggctgtgagaataaaataaagaataaaatttatgctctgtaggagcttccagtctaatagaaaagatgcacttacgaatagacttttgttataatataaaatgtgcttcttgaattaacagcgtttttcatattaggacttagcacagtgcctaacacatagtaggcacatagttaatatttgttgaatgaatgaatgttaataaatcatagtttgtatttagctttattctgttaattagatgtttgctaacttaaagggttttttctgcaataacttcagagataaatgaatcaaaactttaaggtgacaatgacattttataccagtgttaaaaccaaagtatgagatctatcgagtattcattggaagtcacttatttataaaccactaagattataaacctctataggctatagcttactctaacatgttgcaagtatacacttgaaaaataattttttaataaatattcttgatagccatgagtgtgatgtttttgtttaatagatgaaaataaggtcatggaattcttattaaaattttttgttataaataatttatttttaatagaaaagttgggaaatgcagaatctagaaaacaaaaactttctacaaatcagagataatcactgttaatgttttattatactttcttgcagccttttttcttcttttacatttgtatatattttgttttcaagaaaattgagagcattttgtacgctccttttctgatcttctttttccactcaagattgtatggaaagcatttttctgtattgttttctccagaagtgtagtgtcaaagtcaaataaaatagagacaaatctctgaaattaaaacattttatctgagaagaaaaaagaccagcctggcgaacatggtgaaacctcgtctgtactaaaaatacaaaaattagccaggtgtggtggtgggcgcctgtaatctcagctacttgggaggctgaggcgggagaatggcttgagcctgggaggtggaggttgcagtgagcccagatcgccccactgcactccagcctgggtgacttagcaagactctgtctcaaaaaaaaaaaaaaaaagaaaagaaaagaaaaaatgcaatttggggcatacacacagactgagcgggctttggtatgtctgaagaaaagagaaggttaggttttatgagaaagaaaaatgttatgtattgctgtttgagaaagttcattgacactagtaaggttctggagggctgacaagttttacttaatctcatgtaatcaatttatattctgcttgatctccgttaatagtttcatgagtccgtcagtttctttattagagttgtggaaatttttatttagcctattgcacttaatgttatcagcaacctatatttaagagtacttgttgaagtcttttccatgaatctgattgtgcatgtttttagagacaaaacagtaactgtggatgacaaaagcttagaacagccatggttaaaaatctgatgaaagtttacgattgataaggaattttgttatttctattatagatagcattttaggatacaataatcagaattaagactgagttatgagttatacaatttttatgagttatacaatttttgaaacatttatgttaacaacatacccctaaatgcaactaaaataagatctagtatcacttaccatttaacagtttcttatataatttactaaatgagcctgatcatttcatatctctgtaagatgagagatatagatcttttgaggctttccaggggctgaactggaaaatcccaaagttaatttaatttaattttatttttttgagacggagtctcgctctgtcacccaggctggagtgcagtggtgcaatctcagctcactgcatcctccgcctcccaggttcaagtgattctcctgcctcagcctcccaagtagctgggattacagccccccaccaccatgctcagttaatatttgtgtttttaatagagatggagtttcaccatattggccaggctggtctccaactcctgatctcaggtgatccacctgcctcagcctcccaaagtgccaggattacaggtgtgagccactgcagccagccccaaagttaattttaggtcaaaagtacttaattgaggctggtcacagtggcttaagcctgtaatcccactgctttgggaggcctagatgggaggctaacatgtgtccaggagttcaagaccagcctgagcaagaccttgtttctataaaaataaaaaacaaaaaaagacttaattgaggatttgattttggggacgtttgtcaaagatgtcaaaaggctcagaacatctgatcaaaacagaatcacacaggtcactataaaataatggtcatttggctgtgcgcagtggctcatgcctgtaatcccacacttggggaggccgaggcaggtggatcacctgaggtcaggtgtttgagtccagcttggccaacatggtgaaaccccgtctgtactaaaaatacaaaaagttagccgggcgtggtggtgggtgcctgtaattccagctacttgggaggctgaggcaggagaatcacttgaacctgggaggcagaggttgcagtgagccaagatcgcgccactgcactgcagcctgggcaacaagagcgaaactctgtctcaagaaaaataaataataataataataataataataatgataatattcattcagccagtgataaaagatttccaaagtaatacagaaagttacatggatgtaaaaacgttagtttccttaaagtttagttttcctaagttataagatacctaatgagggcaacacagaaattatcttgatgaaatgtggaagttttgtgttctttttttttttttaatgttttaaattctggtatacatgtacagaacatgcaggtttgttacataggtatacatgtgccatggtggtttgctgcatccatcaacctgtcatctacattaggtacttctcctaatgctatccctcccctagccccccacctaccaataggccccagtgtatgatgttcccctccctgtgttctcattgttcaactcccacttatgagtgagaacatgtggtgtttggttttctgttcctgtgttagtttgttgagagtgatggtttccagcttcatccatgtccctgcaaagacatgaactcatccttttttttggctccatagtattccatggtgtatatgtgccacattttctctatccagtctatcactgatggacatttgggttggttccaagtctttactattgtgaatagtgctgcagtagacatacgtgtgcatgtgtctttatagtagaatgatttataatcctttgagtatatacgcgataatgggattgctgggtcagatggtatttctggttctaatccttgaggaatcaccccactgtcttccacagtggttgaactaatttacactcccaccaacagtgtaaaagcattcctatttctccacatcctctccagcatctgttgtttcctgactttttaatgatcgccattctaactggcatgagagggtatctcattgtggttttgatttgcatttctctaatgaccagtgatgatgagctttttttcatatatttgttggccgcataaatgtcttcttttgagaagtgtctgttcatatcctttgcccactttttgatggggttgtttgtttttttcttgtaaatttgtttaagttcattatagattctggatattagccctttgtcagatggatagattgcaaaaattttctcccattctgtaggttacctgttcactctgatgataggttcttttgcagtgcagaagctctttagcttaattagattccatttgtcaatattggcttttgttgccattgcttttggtgttttagtcttgaagtctttgcccatgcctatgtcctgaatgaagcatataaaagttttgttttttaaacaggctaccaaaaaggtgaagaaaaaccttctgtagtatgattgtttcttcttatgtgatgttcacttacataacctggaaatcaaaccggatgaaaagagtacttgaattaatcagacagaggaagaatgtgcccaagattatgaatgtttcaattcagctacgtcaagaaaagccaagatacagtagaggaaaacatagcttttttaggcttttaagataaacctcttagtgtcagatcataacagtcgagttagaataggagaaaaaaagttataggagcagatgaaaaagttggagagagtcaccttctagccaagcaaaaagatacgctttttcaagtggagaaagaacagaagggaataatatatgacttgcaatcatgtacagtgaaggacagcagaatttgaacttctgaggtatacatttgagaagtttcaaaaagaaacagatttcagaattaagtatcaaaacctcttgcagttttactaagagaatgtcaatactttaagaaaagccctgttctacaataggagaccaaattttatagttttgtattagtgtctttttactatcaaagctcaatctttgggaagaccacatgtcattttatttttttatttttcaatttttatttatttatttattttgacacggagtctcgctgtgttgcccaggctggagtgcagtggcgcaatctcgactcactgcaggctccgcctccagggttcacgccattctcctgcctcagcctcctgagtagctgggactacaggcatgtgccgctacgcccggctaattttttgtatttttagtagagactgtgtttcacagtgttagccaggatggtcacgatctcctgaccttgtgatctgcctgcctgggcctcccaaagtgctgggattataggtgtgagccactgcgcccagtcccatatgtcattttattttaattatagccagcttgatcacatacaaaattccatttataaattccgttttcacaaaccctattacaatttcactcagaccattaatgacatgcttggactttctgctttgtcctgtatttcctttcttaaataaccattttattttaggatgaaaatttgccacataagattctttgtcatacaaaattattctatttctcaataaaggacacattttaatgcctatcttgtaattaaaaaaaatttttttaagagacagagtcttgctctgtcacccagactggagtgcagtggtgcaatcatagctcactataaccctgaactcctgggctcaagcagtcctcctgcctcagccaccccaattagctaggactacaggtgtgtgctaccacacttggctaatttttttttttttaatttttttagagttgggtctcactgtgttgttcaggctggccttgaacttctggcctcaggataccctccaacctcagcctcccaaagtgctaggattacaggcatgtgctaccacagccagcttgtatcaacaattttaaaaacaattaatttatcaaagatttacttaagtcacaagaactgaaaaaacatttgggttaattactacatattttatatgagcacttgtttacttaaactaatcagaataaatttttttagggatttctggctgactatatgagattttattatgtagacacagcatacaacatagtatatatatataatataagcatatctacacagatatacatacttataaataaattcttatggcttttgttttagagttttggtcatgaaatagtaaaacactcaccaatttataaaaaacagtaggatccagattatctttctgacaaaatggaataaggccaaacttaatgttcttttttaaaacaggcaatattataagggttgtgaactaaattttgagtaaagtagtttgagtcagttaccaataaactggattcgacacagaatagttaattgtggaaatatgactgaattatcttctaacaaggtctgttcagtattttattggtctcaattctttatccttgaagataaaagtgttgccattccttttactgtgggcaggctatctttacatgggaatttcatttttgcaaaggaaagagcatgaaggtcaaaatgattttctttaatatctgctggttttaagtgttttacttaaatggtcagtatgccagaatagttgaagagttttgaagaaagagtttagaaaaagataagaggaggcagagcgggaggggaaagctctagagaggaaagtgattcagctagctttgaggcagtgttttgtagtgagtcattctttgagtcctgaatccttttttttagcctcaaaatatcaatgagatacgcatatcttatttggagtatattattttctaactgtggtcttttagtttaaggaacaacagactgtttgaatgatccttacgatgtttgaacatgttaccggctggaatcccagaaaatatcttggcatgcctttgaattttgagagcccattttattgtgggtgctctggtttaatcccaaatacacaaaaaccaattaaatataagcactgaatttgcaaaggccaaataaacgcaagcacagatgggaaaataaagtacccacttaccaagaaggacgataagaagccttctccaactgaaagaaaaaagagagatcccaaggcctcaacccaaagggaaaaatcccttccctgagaccccacagccagggtctacaaggaggaaaagagtcttccttaataggagatccctcagccagatcagacgggaaggggaaagacaccatcccatccaaatcccagataaaacagaactcaaccaaaatcgggagttcagtccaagaatgactcactaagggaaaaagaggcaacttgcagaagccgttagaggagggggtgactttcagaggtccccagtgtggctaccttgtactatagttccaatggctgctgatcttctctgagatgagtcagccttagactcatacttgaccaagtatgtcaaagtcaaatgaaacacagagatgaatctctgaaattaagatgttttatttgtgaagaaagaattgcaatttagagcatgcatgcagacagaatggtatgtccgaagaacaaagagaaggttagaggttttatgaaaaagcgaaatgttatgtgttgctctttgagaaagttcattggcactagtaaggttctggagagcttgccagttttgattggtgagtgatggcagtgggtaaaattagccttagaatttcagcagatcatttcagtagccattagataaaactggtttccagtaatagcaggcagtttcggcagacatgcttgcagagaattacatttttgggtcaatgttatatgtcctgagtgcttcccccccgccctcttgactctgttttagttgggtatgacaggaataacccagttcatatgatcaactttcacagtagttaatgatataaataccttaatttatttcaccattcctctactgttggaaaaataggtttatagcaggtcatgctattgcatacattttccctctgtcttccttacaaacaatatctctattttattcagatagatgggattggggttgcagggagaagctttgatctcagggaaggaaggcccttatcccagccccagggaatgaattctgggtggtctgaactactcaagccaatcaatttcctgtcactaatgattggtctaggggtaaacactggattttcttttaaccagtaatatataaagggaactctgctgggtttttgtttgtttgtttgcttttggaaacactctttcttgatgaaaagactattgcaaggttgaagcttttggacccccattctaccatttcacttcatatgtggatgtgtgtactgtagcagccatgctgtgactatgaggaggtgacatgactaaggaggaaaagcagacctgtgaatcgctgatcacagaggtacagagggcttggtttcttggtgaagatgttgaactagtacaccaaacctggacatctcatctccagacttgatgtgttttttgttttgtttttttttttttttgggacggagtctcactctgttgcccaggctggagtacagtggcaccatctcggctcactgcagcctctgcctcccaggtttaagtgatcctcctgcctcaccctcccgagtagctgggattacaggcacccaccaccacgcctggctaatttttgtatttttagtagagatggggtttcaccatgttggccaggctagtctcaaactcctgacctcaggagatctgcctgcctcagccacccaaagtgctgggattacaggcatgagccaccgcgcccagcccagactttgtgttttatgaggtatttaaatatcttacacaacagcaaattggatttgatatcacttgtatttaaatggtacaaagttgtcttccaattatttccactctgcacattgctaaagttaacatctttttgaatatatctgtgatggcatttcagatacttagatcagattctcacacatgaagtaactgatcaaagagtagaacatttttaagacttctgccgctgataaaacaaaatagtaaagttttatttatctttgagacttttggtgttccctcttcatttgtacctattacaaaatgctggctgggcgccctggctcacaccggtaatcctagcactttgggaggccaaggagggtgggtcacctgaggtcaggagttcgagaccagcctggatgacatggtaaaaccctgtctctactaaaaatacaacaaattaaccaggcgtggtggcgtgtgcttgtagtcccagccactcaggaggctgaggcaggagaattgtgtgaaccctggtggcagaggttgcagtgagcctagattatgccactgcattctggcctaggtgactgagtgagactctgtctaaagagaaaaaaaaaataaaaacaaagtgcttcctcttcctctgtgagagaagaagctaaattttagtttctttaattgattttgtgagaaaagaaaagattaaagggaacattttcagcaaagatatactgtattaaaagcacagaagctgccaaagagaaaaatgttatcagatgagcaggtgatataaatgttattagatgaccaattgatgaacaggtattgacacatagaaatgattctggaggcagagtaaaaattctgttcacacagaagtaaaaagtaattgagtggttgaacagatctcttgataatcatgaccttgtaattgaattatacaagacaattgtacagttgcatcctgatgtataaaataaggaaataaaacttgaaattagaggccaagaagcacatcaccaaatgacattatactatgggtggattgtgcctttatatatctcgttacctcaaaaaggtgagttagaaggcacaaatgtatacccagataaatcaaaagatatattgtgttcttggttgggaaaggtaggtatagaaaagagaagtgcattctaaatttgtatattgatttaatataatttttccttggaatattttgtgaaaattgttatcttggtaatgaaatttaacccctcaaaagaataaagccacacaaggttatttatatgtgtctacatgtttaagctttatgattattttgcaatgcctgtttcaaaatgtgtatatgctttaatgcaacaattccatttttcagaacctatgctttagatgcactcataattacgtacaatgatgtttgaattgtttgtcacaatgattgaaagtttcttttggcatttgataaacaggcttcagggatacaaaataccctgcaatgtgtaggagacacctaaacaacaaagaatgaatgattctcagattgtcaacagtgcctgtgttagattctggggatctaacagggagatgcacaagcaaagtcctttactgtattttctagtgagagggacagcatcatgtatttgtttaccatccatgagaaccaaatcagaggaaggagctaaagcgggacaggagcagctaacttagatggagtgatcagggcaggttcttttgaagaggcaattgttgaacagaatgacctgtgggaacaagctgtgcatagatcaggggaactacattccaggcagaggcacaaccagtgtaaaagcttacaggcagaagcaagtctagggcagtccatgtatagtagtgaggctatcgaggctagacagaataatgagtaagggagagatggaagaggtgcagagagtggggcagatagatgatgtcaggcctagtaaaccatgtcagtgcatttgggttttattctgaatgtgctaggaagttattggaggaattttttttttttgagcaggggagtgacgtattcacatttatgttttaaaacaattactttggctgttagaaggtcagttgacttttggagcccaaaagcaggtgcagggagaccagtgaggatttaatctagtaatataggtaagagatgtcagtaattagattaggcatactgagaaacatttggattcaggatttcaaagtctttcctttttgaggaggtgggaaagtctcagttgaattgatcgagctcctcaggtcatggcacatttctcatcagtctttgcaaagtccctcttttttgttttattctttttgtgcttatctgtgatctctgagttccttactccctctccccagtatacacatgcttctactgtatttaatatatgattcagaatacatctaatgtatatatgaatgaatgattctcagattgtcaacagtgcctgtgttagattctagggatctaacatggagatgcacaagcaaagtcctttactgtattttctagtgagaggtacagcatatatatatataacaaatatatattatatataatagtgtatataatatataatatataataagtatatattacatataatatacaataagtatatattatatataagtatatattatatataagtatatattatatattatatataagtatatattatatattatatatataataagtatatattatatataagtatatattttatattatatatatagtaagtatatattatatacatacataacaaataaatatatatatattcaaataatttgagatggagtcttgctctgtttcccaggctggagtgcaatggcacgatctcagctcactgcaacctctgcctcccaggttcaagcaattctcctgcctcagcctctccagtaactgggattagaggcgcatgctaccacgcccagcaatttttttttgtatttttagtagagacgaggtttcaccatgttagccagggtggtctggatctcctgacctcgtgatctacccaccttggcctcccaaagtgctgggattataggcgtgagctgccgtgctgagccaatacatctaatatattaattttttaatgtatagagcttttacagataaaatattttaattttacataaatgatatggtgctgtccagtggtcttgaaatgttaacatacaccattattacctggaaagcttgtgcaaacagaggttgcaggaccctgaccctgtttctgactcatcaggcgtggggtggaacctggcaatctgtattctgtcgggttcccaggtgatgctgtttaccacactttgagatgaatgtgaccatactttgagaaccactgttgtagtgctatttatactgttgacttttttcacttaccactttttttatatttatatatattttattatactttaagttctagtgtacatgtgcacaacgtgcaggtttgttacatatgtatacatgtgccatgttggtgtgctgcacccattaactcgtcatttacattaggtatatctcctaatgctatgcctcccccctccccccaccccacaacaggccccagagtgtgatgttccccttcctgtgtccaagtgttctcattgttcaattcccacctatgagtgagaacatgcggtggttggtttttttgtccttgcgatagtttgctgagaatgatggtttccagcttcatccatgtccctacaaaggacatgaactcattattttttatggctatgtagtattccatggtgtatatgtgccacattttcttaatccagtctatcattgatggacatttggattggttccaagtctttgctattgcgaatagtgccgcaataaacatatgtgtgcatgtgtctttatagcagcatgacttataatcctttgggtatatatccagtaatgggataagatatatccaggttactactatacgtgcctctagttgattgctttctgcctgctgtatagaatttcacagtatttatgtatgacactttagttttctcttttgcttggtggacacctagtttacctccagtttctttctaacatgaacactgctatgatgaacaccctcatataaatctaccatgatttaatgtctctaggttttatgaacaaaatcggattgccaggagaaagggtgtatgcattcatacttgaactgagcattggttgccagatggctcttcagaatggctgtgcaagtctctattcctaccagcagcactgaagaattcctatttcctcacatccctccttccagaatatgattttatctcatattataatacttgccaatataatgggtataaagtagtattctactgttttaattaatgtttctctaattactgatgaaattaagcatctcatatgccagccattcagctcttgcactcactcttaggagtttcttatgtgacctttcagagataggttaaacatatacaagcatatttgcaaatctaatgagaaaatagtgtacttgtcactatacattgccctttaagtgctgctttatctgagtcccacagatttggacatgtattgctttcattatcattcagtattttatattttaagaattctctttaaccctaaaataatgaagtagtatgttttttctttccagtcatatgggatttttttagagctagtattttgttactgattattgatttgatgtaatttgattaaagaaaatgattggaataatactcattctttgaaatttattgagactccttgtggtatagtacagagtagatttttgtgattttcccatatattcttggaaagaacgtatattctctacttgttgagctattctttataactttgactatttttgtctgcttgaactatcagttactttcagcattgtgtcaaaatttccaactaccattacagtgtcatgcatcatttaataaggagggtacgttctgagaaatgggtgccgattttgctgttgtgaaatcatcatagagtgtacttacataaacctaggtggtatagcctgctacacacctaggctatatggtatagcctgttgctcccaggctacaaacctgtacagcatgttattgtgctgaatactgtaggcagttgtaacacaagggtaagtattgtgtgtctaaacatatctagatgtagaaaagatacagtaaaaaaaaaaagagaaaaaatggaatacctgtataaagtacttatcatgaatggattgtacaggactggaagttgctctgggtgaatcagtgaatgatgagtgaatgtgaaggcctaagacattgctgtatactaccagatgctttataaacactgtacacttgtgctatactaaatttattaaaaagtatttttccttcttcaataataaattagccttagcttattgtaactttttactttataagatttttaattttgagctgccatcttgcgtccccatgtgtgtgcacctaatctcagctggtggtccacccgagacccccaagcaccaaccctagccccccacgttggccccttatctgctctgagaagatgaaacaaacagttatgagccaggaaagacttgccaaactgcaggcacaagtgcgcattggtgggaaagaaatggttcacagaaagaagaaggcggttcatagaacagccacagcagatgataaaaaacttcagttctccttaaagaagttagaggtaaacaatgtctctggtattgaagaggtgaatatgtttacaaaccaaggaacagtgatccactttaacagcagagatgccagcaaactctttcaccattacaggccatgctgagacaaagcagctgatggaaatgctacccagcatcttaaaccagcttggtgcacactgtctgactagtttaaggagactggctgaagctctgcccaaacagtctgtgaatggaaaagcaccacttgctactggagaggatgacgatgaagttccagctcttgtggagaattttgatgaggcttccaagatggagaattttgatgaggcttccaagaatgaggcaaactgaattgagtcaacttctgaagataaaacttgaagaagttattgggagctgctattttatattatgactgctttttaagaaatttttgtttatggatctgataaaatctagatctctaatatttttaagcccaagctccttggacactgcagctcttttcagtttttgcttatatacaattcattctttgcagctaattaagctgaagaatcctgggaatcaagtttgaaacaaaggttaataaagttctttgcctagtataccaaaaaaaaaaaaagatttttaatttttttaactttttgactcttttgtaataccacttagcttacaagtggtattatgagtgaatgtgaaggcctaagacttatgcagctgtacaaaaatattttttccttatattcttattctataagctttattaaaacctttttttacttttaaaattttttggtaagaatgaagacacacacacacacatgcacgtgcgcacgcatctaggcctacagagggtcaggatcatcaatatcactgcctttcacctccacatcttgtcccactggaaggccttcaggggcagtaacagtcatggagctgtcatgtcgtataacagtgccttctgctagaatccctcctgaaggacctgcctggggatgttttacaatgagcctttttcttttgtaaatagaaggaacaaacttgaaagtaattattaaaagtatggtatagtaaatacataaaccagtaccatttattattatcaggtattatgtactgtacataattgtatgtgctatacttttatatgactggcagtgcagtaggtttttttacatcagcatcaccacaaacatgtaagtaatgcctgcatgtagacattatgatggctacatcactagggtgtaggaatttttcagttcattttaattttatgggaccattgtcctgtatgtggtgtgttgttgactatagcagcattatgtggtgcatgactatattgatttatctgtttctcaacataggcctctgtattagttctttttcatgctgctgataaagacatacccaaaattgggaacaaaaagaggtttaattggacttaacagatccgcatggctggggaggcctcagaatcatggcaggagacaaaaggcaaaaggtacttcttacatggcggtggcaagaatgaggaagaagcaaaagtggaaacccctgataaacccatcagatctcatgagactttttcactattacaagaatagcacaggaaagaccggcccccatgattcagttactgtcccctgggtgtgggaattctggtagctacaattcaagttgagatttggctggggacactgccaaaccatatcagcctctcagtttttgcttgtgttttgaggctgtgaaatatatacagaatatttcataagtggtgtatacaattgattatcatcattcatgcgttctgtatttgtggatatgcctatgtctccttgctaaaattgatttgtaaactcaaaatcaatacagtgcttttgtggtcactggtagacatgtggagagtgatctactactttgagtctcccaatgcacatgttgccacctcagaccaaataaggccacactctcccttcttgttttagctctcatgctttaaacaagtattcttttcatagtctatttagtgcctgaatgcctgctataggtaaccaatctcttcagtttctggtttatctttcctgcattttttatgtacaaagtagatacatacatatgaatttcatatatcttctttattatatagagggtggcatactacagctactcttgtactttttattttttttaagagacaagagtctcactccgtcacccaggttggagtgcagtggcacgatcatgatcatagctcactacagcctcaaactcctcgcctcaagggatcctcctgcctcagcctcctgaatagctgggactacaggcacgtgaccaccacatctggctaatttttaaatgttttgtagagatggggtcttgctgtattgcccaggttggtcttaaactcctggtctcaagcgatcctcctgccttggcctcctaaagcactgggattgcatttgtgagccattgtgcccagccatactttgcttttttcatctaaaaatatatcttggaaatcactctaaatcagtttatagagatctttctcatccttgtgctttattgtgtgagtgcatcatagcttagcgtctctcctgtgtatggtcatttaggttgttcctaatattttactattacacacatgctacagccttgtgcatatttattttcgtattgttggaagtgtatcttcagggtagattcctagaagtgggtcaaaagttaaatgaatgtgtagttttgtcagtttggccaaattgtttttttactatgcaaattatattattattattattattattgttattatttttgggatggagtttctctccaggctggagtgcaatggcgctatctcggcttacttcaacctctacctcccaggttcaagcgattcttctgcctcagcctcctgagtagctgggattacaggcacctgccaccaggcctagcaaatgtttgtatttttagtagagaagaggttttaccatgttggccaggctggtctcaagctcctgacttcaggtgatctgcctgcctctgcctcccaaagtgctgggattgcaggcgtgagccaccatgcctggcctattttcatttttgtgtggtcaaatttacccatcttttattttattgcctctggatttttagtcattagttacacagttcttacctacaccaaattttcacctacaccaggcttaagaagaactcactcatgttttcttctagaacttgtgtggctttttctttttacatttagattgctcatccttttgttgtttattgtgctttgtgtgagatgtggatctaactttatgtttttttttttaaatggcaaccacttgtcccagagccatttatttaaaagttcatcattattactgtgatttgagatgccacctttattatttaccaaatttttgtaggtacttttatactatatctgtagtataaaattccactggtatgtttatctacataaggaccagtaccactgttttgattatagacattttatagtatgttttaacatctggtagggatagtctgccctcatagtgtctctttttagtgttttcctggttattctttcttgcatgttcatttttccatgttaattttagtgtcaacttgtctaactccataaaatagcttgtttgtatttttcttggaatttcatgacttataagttaaattagggagaactgtaatcttttttttttttttttttttttttttttttgagacagagtctcgctctgtcacccaggctggagtgcagcggtatgatcttggctcactgcaacctctgcctcccaggttccagtgattcttttgcctcagcctcccaggcagctgggattgcaggcacttgccactacgcccagctaatttttgtatttttagtgagacggggtttcaccatattggccaggctggtctcgaactcctgaccttaggtgatccacctgcctcggcctccccaagtgctagtattacaggtgtaagccattgtgcccggctgagaactgtaatcttttcatgttgatttattctatctaagaacaagggatgtctttccattatttcatgtctacttttatgtcttatagggacatttaaattttttccttgtatggattttgcacatttcttgttaaatttattcctgtgtctttaggcctctttgttgctgttacaaatggggatttctccaccgtgatgttctgttgattttttctgtataaaaggtctatttttgtttgtttgttttgagacagagtttcgctcttgttgcccagactggagtgcagtggcatgatcttggcttatggcaacctccgcttcccgggttcaagcgattctcatgcctcagcctcccgagtagctggggttacaggcatgtgccaccacacccagctaattttgtatttttagtagacgcggggtttctccattttggtcagggtagtctcgaactcccgacctccggtgatctgcccgccttggcctcccaaagtgctgagattacaggtatgagccactgcacctggccctattttttttttttttaaagatggagtctccctatgttgcccaggttagccttgaactcctaggctcaagtgagccccctgccttagcctcctgagtagctggaaccatatgtgtgccgctgtgccccagggctattgattttgtatgttaattttatatcctgctagtttactgaattattttattatttgagttagttttatcattgattttggggggttatatctgcaaatagagatagttttattttttctttacccattcttaaccctctaattgaggtgtaatcccattggctgatacccttacaccagttttgaacagtagcagagatagtaaatattcttgccttgttcctggtcttagtgaaaatgccgttagtgttttggaattaagtaaaatacaggttttacgactaatatatatgtgtgagtggctgagagagttctagatatttagatagaacatgggaacagagattagagagagatttctatgaaggcttgtcaaattctagggcaataagtatatcacattcaaaaggtttcatttttcaatttgggagtaacaatgagatatgccattacagcaagtcatttgaattatataaattgtgtttatgcattataatggtcacaaagaaaattttatgcttgaatttgtcttgtagtgtgtgctgtatttatggagtttaaagattaatcatcccaaaacattgtttctgcttcggggaaatcatgaatgcaggcatcttacagactatttcaccttcaaacaggaatgtaagtataatcactcctctagaacctttttagttaccctttaacctgtccgaagtaaatcaaacagaaagaaaaaagaaactaatagaatttaaatgcttcctgtcctgttgttatttttttcacctgcaaagaactaagattctatcttctaaaacatttattttgaaaataacttttgggttcccccttgtttataaaataaataattcgggatatttggaaagcacagagaagtctaaagaagataaaagtgtccataatcaggttgcagtgagccaagatcacgccactctactccagcctgggcgacaaagcaagattccatctcaaaaaataaaataaaataaaagtgtccataatcatgccacttagaggtaatcactgttatcacactatttgaaatatggtcttccattcttttttattattatgaaatagttcaggtatacatatatctgtatatattttacaaataaaattgggctcatatgtactgtttaatacatttctgtttcacctaatgtagtagcattttttccatatcattaagtatttttgacaacatggtttgtaagtgttattttagtttttttaaagtattccatcttacgaacacacaatcatatatgtagccaatttagtaacaatcataggatatttaggttgtttctaactgtgactactgctgtaatagtaaaaataagtttaatataaaagtagaattattggccgggtgcggtggctcacgcctgcaatcccagcactttgggaggccaaggcaggtggaacacaaggtcaggagttcaagaccagcctggccaacatgatgaaacccctgtctctactcaaaatacaaaaattagccgggtgtggtcgtgcgtgcctgtaatcccagctactcaggacgctgaggcaggagaatggcttgaacccgggagatggaggttgtggtgagatcctgccactgtactccagcctgggcaacagagcgagactccgactcaaaaaaaaaagaaatagaattattttgaaagtcaaaacaggccgggcgcggtggctcacgcctgtaatcccagcactttgggaggccgaggcgggtggatcatgaggtcaggagatcgagaccatcctggctaacaaggtgaaaccccgtctctactaaaaatacaaaaaattagccgggcgcggtggcgggcgcctgtagtcccagctactcgggaggctgaggcaggagaatggcgtgaacccgggaagcggagcttgcagtgagccgagattgcgccactgcagtccgcagtccggcctgggcaacagagcaagactccgtctcaaaaaaaaaaagaaaaaaaaaagaaagtcaaaacattactagctgattttaaaaaacagataacatggtgggaggctgaggctagacgatcccttcagcccaggagttctacaccagccttggcaatacagcgagactccatctcaaaaaaacaaactcgtagatttccttgactagcatctagtactcataattggctgctcactaacaaacagtatgatgctgactatgttggggatgtttgggagatcctgccccagggcatttgcatttttagttcttcttttcccagatctctatctgcgtataagacatacattctatttcattcatgtcatttattccgagattttctcctctagttgcttttctaaatcataatctcatcattttaccctcataccctgtttcttttcatagtgtttatcaacacctgagatttatgtgtatttatttgttgactgtctttctctgccaccagaatgtaagctccatgctagcaggggtgtgttttgttcactgttgttttccccaacacccacaacagtattagttgctcatagaagttgcttagtaaatattggttgagttcatttgaatgaatgagcatctgtgatttgtatgtttagaacacactcttgaaaaagaatttctgggttagggggcaggcacattttaaagacttttggcatactctaaagtagtcttccagaaaatatgtatattgggttatacgccaaaaaaattttttatttttgtgatgaaagtactgaaataaaagcaaaattttacctgttttgacttctaaaattttagcatattctctataaaataaggaagctaaactaaatatcttgggtcccatctggctctaaaatctaccccttttaacgaatcctgaatatataaatatactttagtgttcatatggttgatattttgatcatggatttcattttgtatccagatttttctgcagattattatcttagaaaaatatattataaaatatttaaacttttattccaaaaataattttcaaagttaaaaaaacttttacatttgttttcagagactcaaagtttattaatctgccacagatccctttactgataggtagattgctatttatagtgtttcatatgctcatatgaattcttgctaccagtatcttcttacattggagatagtagttgtaatgaaaacatccctcctagtagagcctcaaagaaaaggtctttgttattaaaagaaattttagaggataatcacttcttaaaaagtccctctgtcaaaagtcagctgcaagagggcaagatacaaatccttccagcccttggtgacttactggaataaacactttaaatcagcagctaattaccaggaagttttaaatctactgttggtggatgtttaaattggtgtaagttgagcatggtggctcatgcctgtaatcccagtacttttggaggctcaggtgagtggatcacttgagcccaagagttcaagaccagcctggtcaacatgttgaaatcccatctctacaaaataaaacacaaaaaattagctgtgcatagaggcacttacctatagtcccagctactcaggaggctgattgaggtgggaggatcacctgagctcaggagtttgtggctatagtgagttgtgatcaccactacactccagcctgggagacatagtgagaccctgtctcaacaacaacaacaacaacaacaaagatgtgaggtatttgaagagcaattttgtaatatatttataaattttaagtgcatgtccccttgatctagcaatttcatttgtaggaatttattatgcagattgtgttactttttaaatgctgcataaaaaattatcacaaatttagtggctaaaaagaacacatttattatctcatagttattgtaggtcagaagtccaggccacagtgtggctagattctctgtataggatctcactgaaatcaaggtgttgccagggtttcagttctcatctggggcttagggtctttatccaaggtcacttgttggcagtccttgtaactgtaggattaaggtccctgttgtcctgttagttgttgaccagggatgactcttagcttccagatactgcttgcagttcggtaacatgtcgccaccagtggtagttcccaatatgaatgtttgcttttttccaggccagcctgaatgcatctctctgaccttctcttctgtgatcagctagctggaaaaaaaccctcactcagtttttaaaaggctcaccttaggtcaggcatggtggctcatgcctgtaatttcagcactttgggatgccaaaggggagaggatcacttgaggccaggagttcaagaccagcctgggcaacatagtgagacctcctctctgccaaaaagaaaattaaaaaactagaattcagtcagcctgcatggtggtacaagcctgtagtcccggccagttaagaagctgagactgaaggatagattgagcctgggtgtttgagattacagtgggctatgattgtgccactgcactctagcctgggtgacagagtgagaccctgtccctaaaaataaataaataagtaaataaatgttcacctgattagatcaggccctcccaagataatctttcttttgccatataatgggacaaaataatgggagtctcatcatacttacagttttcatccactgaaagaggagtggattatacatacaaagatgtaggtcaatgcaggtcattttagaattcgtctaccacacagatatactcacaaaaagatagtaaaatatggatgcttaaggatgttcactgcagtgttaattgtaacaacaacaacaacaacaaaaaggtaatctaaatgtcaacaagacagtgatgaaataagtgataatatgcttttgaacaatggaatgctaggcagctattgaaagaccaaggtggccgggtgcagtggctcatgctcataatcctacactttgggaggccgagatgggggcattgcttgagcccaggagttcgagactaacatgggcaacacagtagtaagactctctctctacaaaaaatttaaaaattagctgagtgtggtggcatgtgcctatagttgcagctacttgggaggctgaggcaggaggattgcatgagcccaggaattcaaggctgcagtcagctatgatcaccacactccagcctgggtgacagagcaagactctgtctccaaaaacaaaagacaggcagaccaaggtagacccataatatgtactgatatggagagatgctaagatattttataaggcatttgcagagcatgtaaatggtcatctcctttgtaaattaaaaatatataatgtacagaagaaatcattaacagtgggaggttgggttaggaggacttagagggtttttttgttttgtttttgttttgtttttgtttttttagatgcagtgttgacatgttgcccaggctaatctcaaactcatgcaatcctccagccttagcctcctaaatagctgggactataagtgcatgccatcgcgcatggcttacttttaattttatatcctctctagtattgtttgaattattttttaccaccactatgtactacttttataattattattatttttcaaattggtaatttaaaaattacccagttggggcccaagcatttgaaaagctttgtaagcacccaaggtagttcagctgtgtgctgctggttaagaacgacggctctggagtctttaggaagcttctactatctgtcgtttgggaaccacttcaccaaatacaaaaatgggaaatattttattttatattatttttctaaaccaaattttagggtattccttaacaccttcatttcttacctgggaaaattaaataatgtgtataagttaacaaatgccctggaatgtaatactcgataaaagctaattttatgaattaggagtagatacgtagtgaagaaagctgcctatggctgcctttgttttgaattaagtttcagagggttttttaggtgacatttttcttaattattcttttgtcttatcagattttttttatttttaatttttatgggtatatagtaggtgtatctatttatggaatacatgagatattttgatacagggatgcaatgtgtaataataacatcagggatttttttgacagactatttttagaagatggaacaataggtcctggaaacattttaagtatctccttttgcccagaatttcttaccttaggtttttatttgcttttcacatgatttaactgtagttaaacctgatggctttctttttctcctatctaccaagatattccttcttttttattataatgctgcatctgaaatgtaaataaatcttggaacaagcacacagattcaagtataagtttaaaattttattcttgtataaggagagagcatgtgtgttgctctgcatgggtgtttttactgataagctgatctctcttcagtggccactgtggcttttagaactagcatcttatcattaataagggaggcttagtttcagattgtgcagctgtaatcttgttcatgtttttaagagggaggtgggtgaaggcttttcttgtatcaatcttaaattgctttataatgcagagattttttaaaaaatattcctttctttatggaaaagtaataatgtttttttttaaattgatgtataatagttgtacgtatttttgaggtacatgtgatatttttactatatgtatacaatgtataattattatcaagtcagggtaactgcagtatccatcgcctcaaacatttattttttctttgtctaacagttaaacaaaatttatttttttaagagacagggtctcattctgttgtccaggcttgagtacaattgtgtaatcatagctcactgcaactttgaactcctgggcttaagtgattctcttgcctcagcttcccgagtagctgggactgtaggtgtgtgccaccatgcctggctaatttttaaattttttgtagagactgagtctcgcctatgttgccaaggctgaacttgaactccccaaaggatccttccgccttagcctcccagagtgctgagattacagatgtgagctgccatgcctagcccctaacagttaatttttgacatatcatttgtttttgcaaaaatatttcttcattgttatgtacttagaaagcaagaaacatagtgcctgcctccctccctccttccctccctccctccctccctcccttctttccttccttccgtcttgctctgttccctaggttggaacacactggtaaaatcattgcttactacagcctcaacctcccaggctcaagtggtccctacacctcagcctcctgagtagctgggactacaggcacgagctctcatgcccagcctatttttatgtttttatgtatttatttatttattttctttgaaggaacctcgtgtttatattattccacaaatactctgggtgcaacctcatagctctggatcagagtttctaaagtaaatgaatttcttatttccacgaacctattttttttttttttttttttgatagggagtctcgcttcgtcacccaggctggagtgcagtggcacaatctcggctcactgcaacctccgcctcccaagttcaagtgattctcctgcttcagcctcctgagtagctgggattacaggcacgcaccaccacgcctggctaatttttatatttttagtagagacagggtttcactatgttggtcaggctggtctcaaactcctgacctcgtgatccacctgcctcggcctcccaaagtgctgggattacaggcgtgagccaccatgcccggcccttccatgaaccatttttttaaatgtatagttaaatagcttactgacaagttccagaaactcctgtaattttactaatgaaagcagtattgttatgacaactggattttttaaaaaaataaatactgtttgtcattgctcattgcagcattttttagagtagcaaaagattgatctaattagattgtggtatatccataaagcgaaatactaggtaaatgttaaaaaaattacaaagctctcctgtaggggaggcaaaattttacctttactctcagggtttttcagctgggcctgagaattaaattgacatgagataaattaataggagaagagcatataaatttatttaatataagttctacatgacataggagccgctataaggaaatgaagatccagagactcagagttgaacacttacatgctgaatcggacaaaaagtagtaagttgtgaaaaagtaactaaatgatgtgaggaggctagaagataagagttatttgaattcagtctcaactattaatccttggtgataacaatgttattttccttctagtacagggagggcatcttttcttttttttttttaacttttattttaggttcaggggtacatgtgcaggtttgttatataggcaaacttgtgtcataggggtttgctatacagattattttgtcacccaggcactaagcctagtacccagtagttattttttctgatcctctccctcctcctaccctccatttttaagtaagtctcagtgtctgttgttctgggagggcatctttcaaatgggaatttcatctcctgcttttaaaaagcagcatgagccaggcactgtggcacgtgcctgtaatcacagctacttgggaggctgaagtgggaagatcgcttgagcccaagagtttgagaccatcctgggcatgtaacaagaccccatttcaaaaaaaaagaagaaacagcatgaaggccagagtgatcttcttgtacgtgtggtttttcaagtgcctttaactcaaagttgtcagtgtgccagagtggtgtattttggggtggcatattcttaactccactcttcatctgaagatgtggcatgatagccaaaatacgttcttaagtacgaaaagcaagtaaagaacagtacatatatgctatcatttatgtaaaaaccaaaaggatgttttggaaagagaagaaacatatatgtctgcatgtgtatgcatagaacatctttgtaaagacacccaggaaactggtaatattggttacctgcagagagagggcaggaggcacattatacccttttgtggcttctaaaatttgagctatgttggggccaggcacagtggctcacgcctgtaatcccagcactttgggaggccgaggcgggcagatcacaaggccaggagattgagaccatcctggcgaacacagtgaaaccccgtctctactaaaaataaaaaaaaattagccgggtgtggtggtgggtgcctgtagtcccagctactcgggaggctgaggctggaggatggtgtgatcccgggaggcggagcttgcagtgagccgagattgtgccactgcactccagtctctcaaataaataaattaattaattaattaattaaattaaataaataaaaaataaaaaatttgagctatgtctcacgcctgtaatcccagcacattgggaggctgaggtgggaggatctcttgaggccaggagttctaggttgcagtaagctatgataatgccactgcattccagcctgggtgacagaatgagaccctgtctcaaacaataataataaaaaataaataaagcaaataaaaattgaaacaaatatatcatcagtgactagaccagattgtgatttcttgcaagtagtgctgactctcaaaattgctttcagataattttgttgaaaattttgttttgttaatgttgtattattgatactagttagaacttgtatcagtgtcatcctgtggctgtaatgcattttcccttcactatagaaataactgttttatgggatatatcctaaaatttgtcttgaaaataaagcaattgaatcagctaatttaacctctgggaattatgtatttggctatttagattctcctattcaaaatcttatttaaaaataatgattaggaggaatattagagggtcattaagagcatgaacaggtttaagtctcagttctgccagttacttgcttgcagctttgggcaggtaagcctaatttcctcagtttttaaatgaagacagtaataatacctacttcacagggtttctgtgagtattaaatactttcatcagttaacacagtatgtactaagtgccagcattattctgcatattttacataaatgaattcatttaatcctcacagcaaccctgaatctactgtttagggtgttattattattatgaccatagataaggaaaccaaggcacagagagttaaaatttttatccaaggtcccatagctagtatgtggagggggctgcagttcttcaaatcaggcaacaagttccagactccattctcttcaccaccatgccatgccaaatgcttaactcactgacagacacatcatgagccttcaatacatttaaataataaaggtaatataggccaggtacaagtgcagtacctcatgcctgtaatcccagcactttgggaggctggggcaggaggattgcttgaggccaggaattgaagaccaacctgggcagcatatcgagaccctgtctctacaagtaatttttaaaaattagctgggtgtggtggtgtgcgcttgtagtcccagctacttagaagattagacaggaggaccacttgatcctaggagcttgaggttacagtgagctatgattgcactactgcactccagcctaggcaacagtaagatcctgtctctaaaaaaatttttttaaaaggtggtataataataaatgttattatataaagattacatattcatcataaaaaagaaagaacagctaaactaagaaaaatatagataccattgtcagtctaacccctcagaaaattaaatactggtaattatatatgcaattcatatactttgaaaaaataaacatggtgatatttcatagcctattttattcacatattaatataacatgaacttctttttgcttaatttttgacctcctgttttaatttacaaaatgacaatacacttccttacttgtccagacttggcattcttttttggaagtaggctaaggaattattttgagtcattcttgggattgaaaggcatttatcaatgtaagatgttatggagcataaattaataagtaattgaaattcctacctctattcaagtgtggaactcccatggaggaattccttactgacactggcaacagagggaactctggttcctaggattttcaggagaaaaagtcaatcactgaccacaaattaaagagttttctgtttgttttttacttccaacagactttatggccaatgctggatctactttgaaatgggcaaaatttaaaacaaagcagagtataaggatgtaactgtaaggagaggcaatgatgcataagacatggttcttgtgaactttgagctcctaataaagttagcatatgttgtggaatagattatgctgactgctacaacagcaatacaaaatgttctgaaaacctcaaagaaacccacaggctcccttaatgaactcaaaccctaatcacccagtattggcgttaaagagaaatcttcacactcagggatggaaggccttacaacctcaagcgtggtctactggtttacactttccttagggatctctctcttaatcattcctgccacccatatagtactgcagtctggcccaaatctggacccatcattcttcactttattccccaaaaccttgccaggaccaggctctgatccttaaatatgtctttctaaaggcttagagatcacaaaaaggaaataaacacagaaataattaccaactagatagtctgactcactcgatacagctttggtctcttggtcctgtaggccacctcatcttcccagaatcctggaagaggagaaggagctcacggttctgcagggttgcctgactatatttctcgtcttctctacccacacacatccctgagcacagcttgactttttgaaaccaaggccaaggaagaagaaaatgttcctttttctctttaaacacccattttccagtttcccacctattatttcatgacttttcctttccagagatttgtagagactcctccttccacccactgatgtatttccttattctgtagccccaagttgacagccacatcaaaatataatttattaagccaaacatttattttttattgtttagagacagaggctcactctgttgctcaggctggagtgcagtgacactatcgtagttcactgcagcctcaaactcctgggctcaatctatcctcccacctcagcctcccaagtagcttggacagcaggtgtgtgccaccacagccagctaattttgtttttcaattttctgtaaaaacgaggccttggccaggcgcagtggctcacgcctgtaatcccagcactttgggaggccaaggcaggcggattgcggggtcaggagtttgagaccagcctggccaacatggtgaaaccccgtccctactaaaaatacaaaaattagccgggcgtggtggcgtgtgcctgtagtcccagctacttgggaggctgaggcagaagaattgcaagaacccggaaggcagagctgcagtgagctaagatcccgctactgcactccagcctgggggacagagcaagactccgtctcaaaaaaaaaaaaaaaaaaagaggcctcactgtgttgcccaggctggtctcaaactcctggcctcaagcaatcccccgacctcagccttccaaaacattgggattacaggcgtgagccaccacaccagtttaagccaaatgtttttagagaaaatagaatcaagacataatttgtttacagaccttaaaaattatgagcaaaaacattattgacattttattgatgtctcttaagactccagtttccacttatatatcttcaacacccctaagagatctttaagacccaataaaatattcagactcacaagactaccatggaccctagttgtcatccatatacttaaaaggatataggtcaggaagggcagcactgggcattccttttcagtggagtggtcctcacaggagtgcataccgcagtccagcagctttccatctctcttgccccctcccatcttctcaccagctcaggtacaaggaaatatccacagtgggaagattagggagccatcctggtatagaagcctcgtgcatcaaaaatgtcaatgtgtgttgtaaaactaccttcagaggagcccaaagctatagcttcccaccaggtaactgggtaatttttaccacaagccatgttgcctaataacacagtggacagtcaccttatcacatttccaagcaacagagctggaaagttaatccaaggtcacacttgtctttaagaggagagaggtattgttaacctattatccacaacttttcaaaagtatctttacaaagataattgtgctttcaaatcatctaaaataaatggctctaaagtagcttcatattctcctggcctatatcctttttcaaatgtgatacgttttagttcttccattgactggttttccttttttgttaggtcgaatcaaatattcggaacaggtgtatgatgcctgtatggagacatttgactgtcttcctcttgctgccctcttaaaccagcagtttctctgtgtacatggaggaatgtcacctgaaattacttctttagatgacattaggaaagtaagtaatcttttattattctcacagggaatatttttaaaatgtgttgggtttttttgttgttgttgtttgctttgagacagagtctctctctttcacccgggctgaagtacagtggtgctatctcagctcactgcaacctccgcctccctggttcagcctcccgagtagctggatacaggtgcacaccaccacacctggctaatttttgtatttttagtagagacggggtttcaccatgttggccaggctggtcttgaactcctgacctcaactgatctgcccactttggcctcccaaagtgctgggattacaggtgtgagccaccgcacgcctggcctaaaatttgtttcttattgcagtcaaccaatatatctttagctgaaatctttaaaatatagataatgaaaagtaagaaaatggaagttacctctgatttcatcactataactactgttaacattttgatatgtacctaccacaaattataatttttaatgagctctatgtttttaccaactagaaagctaacattcttgtagtatagtcctgaaactttgaattatatcgcagtgcaaaaggaaggaaaccagggttctaatcacagtcctgccattaactgtgtaaccttaaccaagttattgaacctcttagtcacatttcttctctatgaaatgaggaagttggaagggatggtctgaggacactgccagctccgaaatgcattggctttgacattttagatgataacggtttcattgttttacttgccttccttggtgattattatttccaagattctgtatcttcattatggaaaaagatgaccaatttttattgtacatggttgtcttatcttctctacctttgaattcttctacctgtctctctgtcttttttaatcaaagtgatagatactcatcctctcttacaggtactgagactaaaaatttttctgtttataaaactattttctctgaagaaagtctcctcagggtaagagggtgtacctatatgtactggctttcctcttgccttactgtcttttaagtaaccagcatttctcttttacatagtaaaatatgaattttataattctgaatcaattgtatcaataaaaagctctttcacgcagtagaaattctcttcttggcattcagctattctattacttgttttctcttggtttttatgctttcaactaaagcagcagtgactaaaggcttaagttaataactcatattgaaatacctcaactgcatagactggaaaggataaatgcccttacaaaattagcattctttaaaataaagaaatctccactggaatgaggtttgcaatgaacagaaccattgtaaaacatttctgctgtcatggtaacattggctcacctagacaaataaaattaattttatatagtcatagtctttctaaaatagtatatctctatagtggttgatttcacatttgaattaaattagcactgctttacgattaggatgtaagagggtcttttactacagtatggttagatgacagggatgtttataaaaatttattgcagaccgggcgcggtggttcacgcctgtaatcccagcactttgggaggccgaggagggcggatcacctgaggtcaggagttcgagaccagcctgaccaacatggagaaaccccatctctactaaaaatacaaaattagccgggtgtggtggcacatgcctgtaatcccagctactagggagggtgaggcaggagaatcgcttgaacctgggaggcggagtttgcggtgagccgagatcgtgccattgcactccagcctgggcaataagaacgaaactccgtctcaaaaaaaaaaaaaatttatttcagaaaaataataaaaattatgtatctaaaattgttaagtgttccttttcttgcaggaaagtcctttaggggcacactggcttctctcctaatacattcttgtgggtgaaaggggtttttctttgacacatactagtttccaagaagccttttgctctcctgatttttttcttttggcttttgtgtgtcttctagttagacaggtttacggaacctcccgcctttggacctgtgtgtgacctgctttggtctgatccctcagaggattatggcaatgagaagaccttggagcactatacccacaacactgtccgagggtgctcttatttctacaggtaagctagtccttgaggtcgaaaattatgaaaggaaactgtaattcattttatcagatgatttttcagcattttatatttcaaatctatgtagtataagcactcctgtttaatttttcgattaataggaggcaagaaacttgtttgtttgttggctttttatattttcttaggtatatatcctaagaagtgtaatacaccaaacatgattggacatcctgcagtgctctgatatttttgtctgactctaagtgatctagactatttgttcctaaacattatctatacacttttttaaaaaaaattaaagctttcttggctctttccccagagattctaatacactaggtctgagaggaatcctattgtattttcaaaagctctccaaattttgtaaccactagtatagactaagatataaaaagaacaggacattgtgaactaagcccagtacatttcctggaagttggctgttgttttaaatttcacaggagctttcattatgattagacactcaaaaataggaagacaggcagggcgtggtggctcacgcctataatcccagctctttggggtgcctaggcgggcggatcacttaaggccaggagttcgagaccagcctggccaacatggcaaaaccccatctctgctaaaaataaaaaaattagccagatgtggtggcaacacgcctgtaatcccagctaattgggagacttcaggcaagagaatcacttgaacctgggaggtgtaggttgcagtgagccaagattgtgccactacacaccaacctgtgcaacagagcaagactctgtctccaaaaaaaaaaaaaaaaaaaaaaaggaagacataagagaagttggaaatctaaattatttttaatcccagtattttattgtggcaaataatacatatgtttatttccctaaaaatctctgttaattggctaagataatgtgttcattagaatacacacatgcacacacacatgaaactttgatttcgccattacttttagcattcttctaaacaacctttttttctttaaaaaaatattttttaaaatttttgtgggtacatagtaggtatatatatttatgggttatatgagatattttgatatagtcatacaatgtataataatcacatcaaggtaaatgagttatccatcacctcaagcatttatcctttgtgttacaaacaatccaattattactcttttatttattttattttttgttgttttttttttcacctttttttttttttttccttttttgagacggagtcttgctcggtcacccaggctggtgtgatctcagctcaccgcatcctccacttcccaggttcaagcaattctcctgcctcagcctcctgagtactgggattacaggcacctaccaccatgcctggctaatttttgtgttttttagagatggggtttcaccatgttggccaggctagtttggaactcctaacctcaagtgatccacccacctcagcctcccaaagtgctgggattacaggcatgagccactgtggccggcctcttctagttattttaaaatttacaattaaattattattcactatagtcaccctgttgtttaaatctcacagtatcaaatactaggtcttattcattctttctgactgtttttttcgacccattaactatcccatttcccctcttactacccttcccagcctctggtaaccatcattctactctcatctccatgagttcagttgttttaatttttagctcctacaaataagtgagaacgtgtgaagtttgtcttcctgtgcctggcttatttcagttaacataatgacctccagttccattcatgttgttgcaaatgacaggatctcattcttttcaatggctgaataatattccactgtgtatatgtaccacattttctttgtcctttcatctgttaatagacacttaggttgcttccaaatcttggctattgtgaacagtgctgcaataaacatgaaagtgcagatgtctcttcaatatactgatttcctttcttttatatacatacatagtagtgagattgctgaattacatggtagttctgtttttagtttttttgaggaactccaaactgttctccatagtagtgtactaaacattcccaccaataggatatgagggttcccttttctcgacatcctcaccagcatttgtcattgcctgtcttttggataaaagtcattttaactgggtgagatgatatctcattgaagttttgatttgcatttctctgatgatcggtgatattgaataccttttcatatacctgtttgccattttatgtctccttttaagaaatgtctattcagatattttgctcatttttaaattggattattggatttttcctattgaattgtttgagctccttacatattctggttattaatctcttgtcagatggatagtaaaaagtctttttttctttcttcttcatttattttattttatttatattttattttattttgagacaaggtctctctttgttacccgggctggagtgcagtggcaccataacagctcactacagcctcaaccttctggactcaagcagtcctcttgcctcagcctcctgagtagctggaactatgggcatgtgccaccatgcccagctgctttttttattttctgtagaaacaaggtcttggctgttttgcccaggctggtcttgaagtcctagactcaagtgaccctccctacttggcctcccaaagtgctgggattacagggatgagccccacccagccaacaaccatttttcattcctccatgccaacttttccagtgactaatgtgatgaaatcatttaacttttatttctttttacattgcttaaaataaagagcataatacatattcattgttgtcagaatagaaattggtacaatttctgtggacatcaacttggcaatatctttcaaaggtatttgtacatggcctttgatccagaaattctacttctaaaacttaatcctgtagatatataattgattctcattacttgtggatttcatatttgtgaattcccccacttactaagatgtatttgtaacacccaaatcagtacttacagaggtttcataatcattcatgggaatgtagtgtgcaatgcaacaaaaaatttgagtcacctcactcacatgttcctagctgaggttgaacaaaatgatgccctaccttctttttgcagccctcatattgtaaacaggcattcttttgagttttatttagtgaaagatgttttatgtttttgtgcttttcatgagtgatttcactgtttagaatggccaccaagtgtagtgctgaagtgctgctgtctagggtccctaagcacaaaaaggctgtggtatgtcttacagagaaaatatgcgagtgttagatataagctttgtttaggcatgagttatggtggttttggccatgagttcaatgttaatgaatcaacagtgtaaatgacctaaagtattattacacagaaacacatctgaaacaaggttatatattaattggtgggtgaaaatgttatgaccggagcctcacaggaacttcaccctgtatttcccttagcagtagtgtttcattatttgctaattctgtttttgcagcaacattatagaatgtagctactgggaataatgagataaaaaatttgactcacccagcacacatgttcccagctgaggctgaacaaagtgatactctgccttcttttatcccagggataaatcccatttagccacagtatataatacttttagtatgttgttgagtttggctttctagtgttttatggaggatttaaaaatctatgttcatcagagatactcacctgtacttttctttcttctggtgtctttggctttggtatcagagtgatgctggcctcataatgtgagtttggaagaattctctcttctattttttggaaggtttaagaaagattggtattaattcttttttttaatgattaatagaattcacccatgaaaccatctggtcctgtgcttttctttgttgagagctgtttgattactgattccatctccatatttgctattggtctgtttgggctttctatttcttcatgattcagttttggcaggttgtatatttccagactctatccatttcttctgggttttccagtgttttggtgtgtgattattcgtaatagtccgttatgatcccttttatttctgaggcatctattgtaatgtctcctctttcattttttgttttatttatttgagtatctctttttttcttagtcttgctaagggtttgtcaattttgtttagtttttcaaaaaccaactcttagttttgttgacttttttctgttgtttttctattctctatttgattcatttctgccctaaactttcctttcttctgcttactttgggcttatttgattctcctttttctagtttcttgaagtgtaaaataaggttgtttaattcagatcttttttgttttttaaatcggcatttattactataaactttcctgtaggtactgcttttgctgcatcccatacattttgatatgtatatttttgttttcatttatcttgaggtttttttttttttagataggatgttttgctctgtcacccaggctcaatgcagtggcacaatgatacctcactgcaaccttgaactcctgggctcaagcagtcctcctgcctcagcctcctgagtagctgggactacaggatgtaccgccatgcccagctaattgtttttaaaatttttagaggagatgaggtcttgctgtgttgcttaggctggtctcgaactcctgacctatctagagataattttaaaattcctttttgatttcctctttgacacaatagttgttcaaaagtgtggtgtgtagtttctatgtatttgtgaattttcctgttttcttaagttattgatttctagtttcattccattatggtgggaaaagatacttaggacgatttacatcttcttaagtttgttgatacttctttgtgattatatagcctaaagaatattctgtgtacacttgggaagaattctattcttctgttatttggcaaaaagttttgtatatgcgtattaggtccattgggttcatagtgttgttcagttctgttgtttgcttattgatttctgactggatgatttatccattacagagaatgatgtattgaagttacttgctattattattattattttgagatggagtctcgctctgtcgcccaggctggagtatagtggcgcgacctcggctcactgcaacctccgcttcctgggttcaagcaattctcctgcctcagcctcccaagtagctgggattacaggcatgcaccatcacgcccagctaatttttgtatttttagtagagacggagtttcaccatgttggccaggctggtttcgaactcctgacctcaggtgatccacccacctcagcctcccaaagtgctgggattacaggtgtgagccactgtgcccgtcctacttgctattattttattactgtcaatgtttgccttcagatctgttgttgctttatatatttaggtgctttgatgttgggcacatatatatttataattgttacatctttctgttgtattgacccttttatcattatataatgacttttgttccctcttgtgatgatttctgacttaaagtttattttgtctgataaaagtttagccactcatgttctcttccggttacttacttgcatggaatacctttctctacccttttactttcagcttatgtgtgtctttaaatctaaagtgagtcttttgtagacagcatgtagttgggtcttgttttcatccattcactcatactatatcttttgatttgagagttaaagtaatgattgataggtaaggacttactattaccattttgttggttgctttctgttttgtggttctactattcctctctttttctctttgtgatttgatttttatttttgtagtggggtattttggttctttttatcttttgtgtatctactgtgcttttttgttcatcgggtttgcatcaaacattttatagttatagcactctgtcttacgctgagaagaaattactttcaatgacgtatagaaactctacactttagtccccattcacacacctaatgtaattaatttcaggttttactttatttttgagacagggtcttgctctgtcacctaggctggagtgcagtggtgcgatcttggctcactgcagcctctgcctcccgggttcaagtgattctcctacctcagcctcctgagtagctgggactacaggcacacaccaccacacctggctaattttttatatttttagtagagatggggtttcaccatgttggccaggctggtctctaactcctggcctcaagtgatctgccttcctcagcttcccagagtgctgggattacaggcacgagccactgtggccagctgcatcttttagtttctacttgaacttcctttagttgctctcataaggctggtgtagtcatgacaaactccagtttttgtttgtctggaaaagtctttatctctccttcattcttaaagggcaattttgatgagtaaagtattcctggttggcaggtttttttttctttcttttagtactttgaatatattatctcccgctttcctggcctgcaaggtttcagctgagaaattcactgatagtcttatagaagcttccttgtatattatatgacaagtaggttttctcttgctgctttcagattttttctttttgagttttaacaacttaattataatgagtcttggtgtttaacttatttggagacctttgggcttcatgaattgaaatgtcccttttcctccctagatttgttaaactgttagcctttagtttttaaaaataagaagctttctgcccctttttcttctccttaactcccatatgcctgtattattttcacttgatgttgtcccataagtcctgtatactttccacattcttttttattcttttttctttttgtccctctaatgctatcatttcaaatgacctgtcttttaagtttcccagttcttttcttctgcctgagtctgctgttgaagctgtctcttgagcttttcagttgagtcattgtattcttcagctccaggatttctatttgcttcttttttatggtttctgtttctttattaaacatctctctttattcatttatttgctttcctgattttgtttagttgtagttcattgagcttctttaagatgattattttggattctttgtcatgcaattcatacatctctatttatttagggccagttactagaggtttattagtttcctttggtggtgtcatttttgcctggttctttataattcatatagccttgcaatggagtctatgcatttgaaggagcaggggccttccagtttttatggactcgttcgccaagtaaataccttctcctattgagtccctgggttgatgggattgcctgtggtattgtgattaagcagggctgaagctagattatggggctacattagggttcacagtcagtgggcgtaccactaggggcatggacaagtatgtcccatggatggggagagctgtctctggaactcaatagggtgggacccaagctgggtcccaggctggtttgggtttatgtttgggtccaatcagcagcccttttaccagaggaatggacaggcatgatttccacaaggcccctgttaaggcaggacttcctcttggccacagtagagcagggctggagccaggtcagagtgctgctttgagtctgcagttgggtctggttggtggatctgttactaggggcatcaacagacatggttccttcccaggatggatgaggctggtggtaggactgcagacaagtgggactggagccgggtttacaagggacaggctgattctgggtctgtagctgaaaggtcagtgggcctgccttctccaagcagcccttcctagtcttgggctccaccaaggtttcataaccacctacctcaatcctaaggttcttacaatggcacttatggccatggatggcttccaaactattgtttctgtaggaggaccagggctggggacattctcttttgctatcttgcttacgtcacctacaacctactttaaaagtaaatttgttctaatgagcataatgagaaacaaagattttaaaaataaactaaataattaatgcctaagtaattccaggttaattttgtatactccagttcttcctatcaggtatttgtcattcagagaggtaatagtatgaaaagaatattttaggagtatatgagaatattgtatctttttttagaatatggttggctaaaatatttacatctgctcctaaaatattcctgcataagcttgcagtgagccgagattgcaccactgcactccagcctgggcgacagagcaagactccgtctcaaaaaaaaaaacaaacctatatatatacatatatatgtatatatgtattcctgcataatattatcttggtgtttatattacctgtgaagctgtaagtatattcttttatttctgtaacaatttgacaattgaagaaaagtatgtgttgaatttttagcatctactacacacacacgcacacacacacacacacacacactactgttgtactttgtaatatcaagacactgataaaagttttggtgttgtattgttatggattaagacaaaaaaattaaaagatgagatggaggagctctttctattgtaggattatctattgttttcatgtttgatctgtagtgaagtatattagtgaaatagagaaacagaatgatgagtactaagctattcataaaatttcagtagtgtgtaatacttgtagttttgaaacaaaatcagctaatatcaccttgacttttccccatcttcctattaaaaaaaattgttttaattctggatttatgttttctaattttcttttccagttaccctgcagtttgtgaatttttgcagaacaataatttactatcaattatcagagcccatgaagcccaagatgctgggtaagttacattaaaattgtaccaaatatcgctgcagagtctttgcatttaatatgcagacagatggactttcatctctttttcaggtatcgaatgtacaggaagagccaagccacaggctttccatcacttattacaattttctctgcccccaattacctagatgtctataacaataaaggtaaaggaatccagcaatatttgagtttgaatttatgagtaaacgtgagctctggtttaattgtatgtacgtatgtgtgtttgtgtcattttaaaacataaattttaaataagaaaaaaaggggtcttagttgaaacaaaggccaagaaatttagaatttatgctgctgcttggtctttatctcctaaggattactggcttctttgtgagtataaataatgatcataataggtcagattgatactacagaatcaaagtataagaagaataaattgcttcaggctcatgccagaatagttagcataaattattggttttggtgaatttaatgtgtttataacagtatctcaaagtcaccattggtattttaatctttgtgaattattaaactatttttgtttttcttgagatatggtctaggtagagtgacctagtgtacaaagtcaaaaaaaaaccttcatttttagtttaaaccctgccagaaacgaatactgtgactttgagtgagtcacattatctttctaatcttcagtttcccatatgaaaaaagaagaatggatatatacatgccttttgttccagaaattttacttctaagactttatcctgttaaagtcttttttttaatttaaaacttttatgattaatagtttataagttttctatcgaggcagtggtcctactaaaaacttcatatttctgtaactattttgttgtttataaagtatgactataaattaataggactttgaaaataaacatgccagaacaaacatatccaaatgagtattgtcccttcaaagtagttaccttgggaggctacacacctattccaacaatgctgtccttgttcaaaaacatttttggaactcctcttttggcattgccttcagagtctgcgacacattcttttgattatcctcaatgatgggaaatcttcgtcctttgagggtggatttgatttttggacagccaaaagtcattcggagtcaagactgataaataaggtgagtgatcaagctagatgataccatttggggtcagaaacaaggtatgattataaggtaatgagactggtttttctcgtgttgctgatacagtggctctggaggcacttccaaaagaggagttccaaaaacgttttgagtaatggcagcatctctggattaattatatggtaaggcaacaagttgtgctgaaaagaacacaaagcaaggagtcagtctagtcctgcttcacttttaagtgtgtcacatttaacaagatacttctctgagcctcatctttaaaatatctgtcatatggggttgttgaagataagttggaataaggaaaatggatattaaagtgttgttcaaaatataaattactataataatacagattttactgttattgtacctgatgtgataatatcaaaggaccacactcatctgataaaaaggtctggtgtgtttgtagctggtggtttcttaagtctcattactttatagttataccttgtatatgcagttggggagataagtttcaaagatggccaaaatataattaatatttactctatttaaaagtaaaccatggaatggcacatctcatttaaatccgatttgggtcagtcattttagtgtgtcctccagtgacttgtctattttaaaaagcatgtctttaacttaagttctgtcctagtcttatgttttcatttaacttagcattcttctctgagccttatctgtcctacaatgctctgcttctccctaagttcatttgttatttcctttttcctgatatttccagtatattagcaacttaggttttattcttatttattctcttatcaatggtgtggactgtttgtgttgttaaacgtcttcaaggactcttgtggccctagatctcctatttgtaatgaaggtgtttctttctcactttcttttttaacttcatcaaaaagagtatctattgattgctcaatggatttatcagtgtgccaagctgaaacacgccacctaagtcagcaggcactatacagctcactcactgctagcttgttttttgtctcaatctaacctggttttgttcttgattatttctttagcaaacttttaacatcacagtcctggccaggcacagtggctcatgcctgtaatctcagcactttgggaggccaaggggaggatcacttgaggcctagaattcaagaccagcctgggcagcaaaatgtgaccccatctttacaaagaaaaatttaaaagttagccaggcaaggtggagcatgcctatagtcctagctactcaggaggctgaggcagtaggatcctttgagtccagtagttcgaggctgcagtgagctgtgatcacaccactgcattccagccaggcaatagagcaagaccctgtctaaaaaataaaaaaaaaagtaaaagccacagttcattctacctgagtattctgtcggctttgacataattagtaacttttatctcaaaacagtcttattttcattggttgtttcttaagcattttagaaggaaaaaggcagaaaatgtggcatttgaaacagtccctgggggtactcagttactccccatacaagtgccttcttttctgaaaaagggaactctattattctttttcttcttccttttcttctactgttgctcttctttctctttctctcttttcttttctctctctttctctctctctttcttttctttctttttctttctgcttccttttcttctttctttctttctttctttctttctttctttctttctttctctctctctctctttctttctctctctctctctttctctcggtctctgtcacttaggttggagcacagtggcaggaacttgattcactgcagcctcgacttcctgggctcaagtgatcctcccacctcagcctcccaactagctgggaccacaggtgcatgccgctacacctggctaattttaaaatattttttatagagatagggtctcgttatgttgcccagactggtctcaaactcctgagcttaagcagtcctcctgcctcggcctcccaaagtgctggtattacaagtgtgtgccaccacacctggcctctttcatattattttttttttttcagagacagagtctcactgtgttgcccaggctggagtgcagtggtgcggtcttggctcactacaacctctgcctcccgggttcaagcaattctcccgcctcagcctcccgagtagctgggactacaggtgcacgtcgccacgcctggctaattttttttattttagtagagacggggttttaccatgttgcccaggctggtctcaatctcctgagctcaggcaatctgcccacctcggcctcccaaagtgctaggagtgctctttcatattctttagacttcttggtatctacaggtatttcctagttccactagttacacgaaagacctttaatcatgatttttaaagattcttattcttgttttcttctgtccactgggaacacacccaaaagcagttttataagctcttgtttccagtcattcactgttgagactcacctcccacttctttttcctgggtagaaattgagggagttgttgaataatgatatatgacatatttacctaaactaaataaaatacatacacgtgaaaataatggaacatgtacatcatagccagtgttaggctttttaagtgctagaaactatattttaatttattttcttaataatatatggtgtacattttagacattcaataacttaaattttaagaacactagattatcctgtagcaaagaaacaggaatgaggacgtgacctatatctgtcatttctggagaactgttacaccctgttttattttatgaccacagaataattaagagaatagtgcaaacaacattgctggtgataaaggctaaggaattggattttaagactttcaaaatataaagaaaatcagtttggcatcaaagtatgtgtgcgactatctgaatggttaatattaaacatagcatgctggcaatacactgctgtgtattggagaaatcggcaattttaaaatccgctatattgaatacagagatgacttaatctaattttgaacatttaattgtaaattgctccaagtttgccatttgtatcttccagtatgagttgataactgcaatatataaactcccagagagtgtatacaatctttgactctggctaatgactagcaaaacaggctgtgtccatttaatgagtaatttttgccttcaaaggagagttgtaattataaccatttggcctataaaaggaaattatggggaaattttcctcacgtggatcttgaggtttatatagatagttactgtgcagtgactccaaagtttcagtttcttttgtacttttattatatgagctcttcaggtaactttgttccttggaataattcttaagagaatgaactgaataaaaggctttaaaattttccatctgccctttacctagtcaagtcctgactttacaaatggaaagttctcgaattctgtgtagcaggtacacagctgtacaaagcataccacttgccatgccatgttcctctgtgccagattttcttgcttttttcctttttagctgctgtgttgaaatatgaaaacaatgtcatgaatatcaggcagtttaactgttctccacacccctactggcttccaaactttatggatgttttcacatggtctttgccttttgttggggaaaaaggtaagagaactaaagcacatgtctcatcagttgtttggtgactgagcataccttatatttgcatgagcccctccatgattcagaaatgttttctaattttgtttgttctctacatagattttttttttttttttctgagatggagtctcgctctgtcacccaggctggagtgcagtggcacgatctcagctaactacaacctccgcctcccaggttcaagcaattctc

SEQ ID NO: 1617 - DNA, 2134 bp, Homo sapiens
gggccacccttagcagcggtcgcggtcggtgccgaagcggtgttccccgccttagccgctgcgcctcccaagagagcggccggtgggccctcgtcctgtcagtggcgtcggaggccggcctgcggtggccgcgcccttctggtgctcggacaccgctgaggagccggggccgggcacggctggctgacggctccgggcagctaaggctgcccgaggagaaggcggcggccgcggcgtaggcgcacgtccggcgggctcctggagcctggaggaggccgaggggaccatgtccgggaggcgcttccacctctccaccaccgaccgcgtcatcaaagctgtcccctttcctccaacccaacggcttactttcaaggaagtatttgagaatgggaaacctaaagttgatgttttaaaaaaccatttggtaaaggaaggacgactggaagaggaagtagccttaaagataatcaatgatggggctgccatcctgaggcaagagaagactatgatagaagtagatgctccaatcacagtatgtggtgatattcatggacaattctttgacctaatgaagttatttgaagttggaggatcacctagtaacacacgctacctctttctgggtgactatgtggacagaggctatttcagtatagagtgtgtgctgtatttatggagtttaaagattaatcatcccaaaacattgtttctgcttcggggaaatcatgaatgcaggcatcttacagactatttcaccttcaaacaggaatgtcgaatcaaatattcggaacaggtgtatgatgcctgtatggagacatttgactgtcttcctcttgctgccctcttaaaccagcagtttctctgtgtacatggaggaatgtcacctgaaattacttctttagatgacattaggaaattagacaggtttacggaacctcccgcctttggacctgtgtgtgacctgctttggtctgatccctcagaggattatggcaatgagaagaccttggagcactatacccacaacactgtccgagggtgctcttatttctacagttaccctgcagtttgtgaatttttgcagaacaataatttactatcaattatcagagcccatgaagcccaagatgctgggtatcgaatgtacaggaagagccaagccacaggctttccatcacttattacaattttctctgcccccaattacctagatgtctataacaataaagctgctgtgttgaaatatgaaaacaatgtcatgaatatcaggcagtttaactgttctccacacccctactggcttccaaactttatggatgttttcacatggtctttgccttttgttggggaaaaagtcacagagatgctggtaaatgtgctcaacatatgctctgatgacgaactgatttctgatgatgaagcagaaggaagcactacagttcgtaaggagatcatcaggaataagatcagagccattgggaagatggcacgggtcttttcaattcttcggcaagaaagtgagagtgtgctgactctcaagggcctgactcccacaggcacactccctctgggcgtcctctcaggaggcaagcagactatcgagacagccatcagagggttctcgcttcagcacaagatccggagttttgaagaagcgcgaggtctggaccgaattaatgagcgaatgccaccccgaaaggatagcatataccctggtgggccaatgaaatctgtaacctcagcacactcacatgctgcgcacaggagcgaccaagggaagaaagcccattcatgacttagagtcctgccgtgctcaggtggatctaaaactcaagaacaaattctatttatttattattggaaaatgaaaagcaactcaaaacaacttcaacctggaggtgcatttataattcagtctgcatttattctgtaaaaaggtgactgttttataaattcttttaatttatgttcaatatatataaaaagtgcatctgttttgtttttcccttttttctccataattttaagaaatgaatctgattgttgtcaacacatttgtgaagtcttgtgctataaaggggaacttcccctaataaaagggccttggaaacctcaaacctgggtttctgacccc

SEQ ID NO: 1618 - DNA, 1509 bp, Homo sapiens
atgtccgggaggcgcttccacctctccaccaccgaccgcgtcatcaaagctgtcccctttcctccaacccaacggcttactttcaaggaagtatttgagaatgggaaacctaaagttgatgttttaaaaaaccatttggtaaaggaaggacgactggaagaggaagtagccttaaagataatcaatgatggggctgccatcctgaggcaagagaagactatgatagaagtagatgctccaatcacagtatgtggtgatattcatggacaattctttgacctaatgaagttatttgaagttggaggatcacctagtaacacacgctacctctttctgggtgactatgtggacagaggctatttcagtatagagtgtgtgctgtatttatggagtttaaagattaatcatcccaaaacattgtttctgcttcggggaaatcatgaatgcaggcatcttacagactatttcaccttcaaacaggaatgtcgaatcaaatattcggaacaggtgtatgatgcctgtatggagacatttgactgtcttcctcttgctgccctcttaaaccagcagtttctctgtgtacatggaggaatgtcacctgaaattacttctttagatgacattaggaaattagacaggtttacggaacctcccgcctttggacctgtgtgtgacctgctttggtctgatccctcagaggattatggcaatgagaagaccttggagcactatacccacaacactgtccgagggtgctcttatttctacagttaccctgcagtttgtgaatttttgcagaacaataatttactatcaattatcagagcccatgaagcccaagatgctgggtatcgaatgtacaggaagagccaagccacaggctttccatcacttattacaattttctctgcccccaattacctagatgtctataacaataaagctgctgtgttgaaatatgaaaacaatgtcatgaatatcaggcagtttaactgttctccacacccctactggcttccaaactttatggatgttttcacatggtctttgccttttgttggggaaaaagtcacagagatgctggtaaatgtgctcaacatatgctctgatgacgaactgatttctgatgatgaagcagaaggaagcactacagttcgtaaggagatcatcaggaataagatcagagccattgggaagatggcacgggtcttttcaattcttcggcaagaaagtgagagtgtgctgactctcaagggcctgactcccacaggcacactccctctgggcgtcctctcaggaggcaagcagactatcgagacagccatcagagggttctcgcttcagcacaagatccggagttttgaagaagcgcgaggtctggaccgaattaatgagcgaatgccaccccgaaaggatagcatataccctggtgggccaatgaaatctgtaacctcagcacactcacatgctgcgcacaggagcgaccaagggaagaaagcccattcatga

SEQ ID NO: 1619 - DNA, 78028 bp, Mus musculus
tgataggagaaagggtctgttggttaccatgtggcatggccattgtatctgtaagagaaggatactgtagcccctccctagaacagccatccctccagtatgccagtcttctcctggttcactgcacaatagctttctgactttaccctttgccatcttcctgtctctttattttgtttgaaaaatacttatttttatgtattctttgaaagttccatacatgtatacattatgtttgagcatatccacccaacatcacatctctccaatgcccctacaacaccccactctgtctgcacccaactttgttgttgttattagtcctgcattcaggtcaattagtgttgcccatatggacgtggtatgtgacatcatcatacattttggtgtggggactctaccatcagcatgtggctagagattgtccctctttcggcagccatcaattgccagtagcttactcaccaaggtggcattttgacaggcttgttctcatctagatcttgtacaggcaaccacggctactgtgagatgacacattgcctcatttttaaagatagaatcgtacactatagccaaggctagcctaaaacttactgtgtgtgtatgtgtgtgtgtgtgtatacactcatatagctagacttgaactatcaacaattggatcttacactatagatgaggctggcctagaacgtactacatattgcaggctgagcttgaactatcaactatcctctagtctcagcctcccaagtgctggcattacacacatgagccgtcatgactagcttcccttcgttcttagcacatcccatgagggagcatcttaaagggcccttgacccttgcacacctcattagatacctcatttgtttccctgagtataatgaggtcttaagttgaacctggacatgtggtccaaaacgcttattaaatcagattactttctcacactattagacaaggaaatctgtgcagacaaattttgtgtctatgatatgaagaatgtccacctgcaggagacattagcagtgtgactattgattgtgaagtagttcgcctaagaacagagggcagcagacacaggaagcagcaaggaagggaacaagagcagacaaagaatgaaagcaaagatgccctttctccagtcctcccgccctcgagccccttgtttgagcagcttttgagaagggttgttttttgttgtttcttcttctctttgtttttgttttgttttgttttgttttcatagactcttgcctgctgaggaccaggctaatcatacactactatgccaggaggttttttgttttgttgttgttttgggttggattttgtttgtttgtttggttggttggttatttttgtttgcttgttttggtttctttgtttttgtttgtttgtttttgtcacctttgaggtttctctttaagcagcctgctgaagatcagctctagagtcttcagctctagagtctcctggacagctctgttctcatcggaggacctggttgaagacagcatcagagatgctgttacaaccagcactgaagctaacaatgaagaggagcagtggcgagtgagagacacccagaactagacaattctgtgcagccttcaacagtccactccctgggcaccagttcccctacttggaaatgagagggatgagggctctatctgtctgggttttaacagtagaatggtggatatgttcaaagcaggtggaactatctggcagtgttttcacctctgtggggctcagcctgtgtttctgattctctccttgggaatggcagttaagtggcaacttggtaacactactgctctgggatggtccctgctctgggatggcccttgctagatctctgtggttgtggttggtgatgtgggaggcaggaggaagtggatggagacaagctgaccattggtttgaaggtccaagcttttaatccccttccctacctgtgaggagagccaggccaaactgaccaggccttgatagccattccccagccagccgtgccctccctggttgacatcatctttttctcctctctagcccatagaagccaacgcagcttccagccaccattcgtgcgtatgaccttgcaccctgacttcatttactgaagatatgcagagtcaccatcaggaataaggagaatttggggtctgaggaaaatcatcccaagcttgggtggggtaaaaataccctgtggattgaaccctaaaaaagttcctcaaaaatgacatgacgtttttctgccaattaaacttccctaaccgcttcctagaaaaggcagaaattcagagaagttgtaaggcaccagaggccgaccagatcactagattctcccctttcagccttggaaaaatcatccactttattaagggcatctttaagacccatggacaggaaaagcctccagacatttgcctacccatgaactggccatcagccgacagggtttcccacagctgcaccctgagctagtgcagcagccacagccttccctgtgccatcctacctgctgccaagtcagtctgcagacacacagcctggcaggatggactggtcagaggttcaaagttgcttgtgcagagtgtttccagctgccattgatttgttaggcgccgtgtcagaagcaagtcaaatggtcgtgacttgtagtagtagattaaataaattgtggtgttcccagacaggaaaacctctgtcagtctcaaaatacttatagggactgtattaactcacagggatctatgtccacaatgtatttgctattggttccctaaagtgccttttaacataatggtacttagaagggcatctctacagatatgtccggataggcacagagtgcctgccaactatgcctgccaaaagccagagagcaattatctggaggtttactctttactgtcttctttataatatactctttttgtatcttaaaatattttttacaatgatacattgtttcattttgtgccaggggtgggggtggggagctatactttcagttttaaaatttgagttaagtcaatgagctaaatcactcatatttgagagatgtgacctgggttggttgccctataagactaaaagccacatagaggacttcttgtgtgccagccaacggtgtctgaggaccttctgggatcaacttgcgttacctgtacagtagctccaggaagcaagtcttttatgatccacatttgacagatgatcaaatggggaattagagaagtcatttgtctaacatctctggctgacaaggggtgaaacagagctctatctggtcaaaggcctgcttccaaagcaacggccaccatgccgtatctttggcttacagcatcaattcaccggttctgcatgcatggggcacggaagggaccgagagctgagcaggagctagggtcacggggtcacgggtggggagaaggcagaagtgaaggctgtggattcaaacagatgaccctgcgggttcttggggtcttgtgggcctcctgttccctcggttccccccacttgtgcttcctccgtcgttaacagggcatcgtttcaggcactccatttagaattaattagttgctatggctacctacctagtagtgagtcatgtggtaccacttcactgccctactgtgtccactaacaccttgttccaggccaagatgtagggagaagagggattcctatgtgagggaagttctgagtgaatgtgtgtttcattatgggcatagcctgtcaaggactccaagaccaactggcccatgggaaactggcaaggctttcctcgggagtctaggtatgagtgtttatgacgagaggtcagtgtgtgcagggattagtaactgcagcttcttcctcctagacgtttacagcctgaggctagtcatctgcagagaccttctaccagactagccagcacctcccctgtgctgtaccttataaaggttgcaggtactggccatagtggtggattagagaaccccgcctgatcccagcttcacagtacacatatgtactttcttcattccctgggtgcccttagtcagagttctgcgacccaagctgagcccatcacccccacactgagacacacagaccccagggtctctgggtagggaagctgtcccagaaggctggaaggtacacaagcgtcctcatctctcaccaccctgtggcaacgctgttcatttgtcattgtctattgggcataagcccctgaggctgacacagttgccttgtggaggcctgtatccccagccttggaagagaacactcagtaagagaacatcctctgttgataattggaagttattcacaagaggccttgcaattaaagtggcatttgtgaattagctcgtaagatttaaaaaaaattttttttctgttttctacttacctggctcagagttctgacaccaagaagttgctggtttttaatatgtaccttaaaccagaggggccagtagtaggccctattttatactagatactcgagtgaagaacttctaggtgttctatgtacattataggctataattcacaaagccctgtgttggaggccagggctctgaacagtcaggccacacagctagagaggggtgaagactggcttctgtctggagctgtccacactaatttccaccctgctccctcctcttgagttgttatagctttgaagaacaggcctgttcttaactctgccgcctacacccatgagagagcaatttaaatttaaacggcattctcctcttctattgctggattggagactaccacattctttctttctccatctgctgctacttcagtctttcaactagaggagatgggtgaaggaaggggagagagagagagagagagagagagagagagagagagagagagagagagagaactgcaatcagagtgtggcctgtactgcaatcaaattgcaaacattttcatccaaaaatggagccaggtgccttttaactgcctcccccagtgctctccgacactaagctgtagtccggtatcctctgtctctgtgtgagtttgtcgactccggatgcttcatagatacgggattatataacgcatggcttagtgcctggcattgtgaccatagaatgctttcaaggtgcattgacatctcacggtatcatatcatcacatcatatgccgctgtgccacttatcctgaggactcaattatattccatcatacggagtactgtgctttatgcagtgctgtttgtggtactgtttgtgggtacttaggttgtttccacttttggactatggtgaataatgctgccatgaacactgacgtagactgtgtgtggatatacattttcacttctcttgtcatgtgtacattgctatgcctagaatcttaggtcatactggaggcctgtgctatggtctgaggacctgacacagtcagttccagctaaaattccaatcctgtatctattcaactcatgccttctcccaaagcaagctaagctcctggctttcccgcctcagagcagaaaagagacgtggccaccttagcttggttccaactgcaatcagtagccttagaatcctgtcttcctatgccacaggcgtccagcctttctgcatctccgtgatccagacctgggagcaaaggtagtcccatttccttcatccttatgaacaccaccatctcccattacacgcatgcgcagggtggtaaacttcccacctttagaaactccatgcaccaaacctttgtaatgcatccagtgtcaatgcatccagcatcctgtgtccagaatcctgtgtcatgtgtccaatgtcctgcgtccagcaatcctttcttctgtccaggaagagggggaaagaggatgacacatgtcttctctaggcttctagaaacttctacctgtcacataaatccactcctctatttttcattgttgaagtccaggagtcaaatgcctgacttcgtgcttgacctctgacaaccccttcacccccaacccccccacccccgctctgaagaggcctttctgggggaaggagatctgacttaaatttgacaattttgagttcagtaacttgccttttggccaggagtcagagccttagttattctctgttcacggtgcagaggggtgaagttggagtggcaagtacttcataaagccccaccctttgcttttagagctcttgtctgtgaatgagctaaaacctctacttgggtcctgaaatgaacatctcagctgctttggacagagcttcagtctacccttccccccacctccctccttcagtggggatcctgatggaattccaagcttctctgtatcctgaaacagaccggcctccagttcctgggctgtaatacaaggggccagtttccaggcagatttccctgtccccagctgtgtatgtccttctttctacccacaagtccctatgctccagaggaggctagccattactcccttctatcaggttccagataagcccatacctgaatcttggttgtagactttgggaaaggtgagaggacctgttctaaagcagctgcaggcttctcttaggtctcaagccttccccagcccctgccctttgttatttctccaaagccagtccagtcagagtaggcacaacacaacagtcaccacagtgcatttagaagaaaatgtcttagggagagacagaaatgggcgtgacatagcctctctttactctgtctctgttcataatggaagcccttggtaattttgtacacttaatgagatcattattatgcatattataatagtatgttttctgacctaatttgttgttttccattaccaatatatatacaatgttagaaggatctactgtcctctctgtctctctgtttctgtctgtctgtctgtctgtctgtctcgctccctccctccttgtcagagacctttgggaacaaagaaagagcttatgagtgtttataatgtaagagatttcacagttatttgtagtttaataaataaagacataggagccctttgctaagttcttaaaatgttttctcggttttgtttgatatctaaccataatctccattactcttcttttaaaagttacttctatagatttaaaagagtaatatgggttcatagcaggcagaaaatgcaatataaggtggaaaaaaagagcaactgcataccaaccacaaagccaccttcttgtcccccatcccgagaaacactctgtggagagttctgtagctgcccctctggcattttttttctctttagatacatagctttccaagcaggccagcatgcagagacggcagcttgagttgctttggctgtgttgtaaagacacttgggctttccttgtttcaaactagtccaggaaaggctggtgggtgagcagccactggagcaaattcaggcctaaagagtggttcttctccatgcttcgctcctggagggtgggctgaggatcccacagatgctaaaatcccagagccacacagagactgcatctcagagccacgagtgggaggaggtctgcagaggaaggcctgaagacctcttcccagacagagtcacccttatgagccctccttttttgtagtcgaggcaaacactcctttttgcaatcattacttcttgctcaagtgagagagtaaaataatatatatttttaaacattttaaaagcaagcaaacaagtatagaagaagggccctgcaaaccaggagtcagagagtcagggaggcaaaagcagagagcaagaaaagccaagacctaaatctctcacatcccctacctctcctgcccctgagggttcaagaagtcttaccctccgcatctgcacttactgtagcctttattttaatcaccttgtttgaattttgccctgctcagcttcatgaaatggtggggccacatgggcctgagttccaatttagccatgcagctaagaaaccactgctatatcttgtgctgtatgttagccattccttcttgtgtagactgactttctagattagaagtgaaaatgagataagatactgcagggaattagtgccaggtcatgcccacctagatgctgtagtaaactaatgcccacccccaccctctcaccccaaaccctagtcatagtctagacccagaacttctgaatttacttggaaactaacaatttatagatacaattataattgatcaggctggacacaaatgcaatggctgatgcctttatagagataggaaagggacagagatatatgtacaagggatggggccatgtaaaaatggggtggtgctctacaaagcaagggatgcccaagactgccatgtagctacctggtgggaagccatggagaagttgggaagtgttcttgttgtatttattttctctatttctctgtgtgtgtgtgcatgtgggcatacctttgtgtgatgcacttgtgagtgtgaatatggagacccgagggtaatgtcagagaatcatattccaccttattcaatgaggccaggtctctcagtcagacccggagcttgtgataatggctagtctcattagccagcttgctgtggggaatccctggtacatgtggaccaggggtacagctaaagggcagctgacaagaacaatggctctagggtgcctggcaggtaagcggcttgagagagcctaaagataaaacagaactgttgaaaacaaaaccaaagtatgcttccaggcagcatgctccagttcctcagaaaccattctggtttgaatgacaccccacacccccgctttttctttttaacaggaaaacagcttcaaggatcgtgaccacatcatttttgttccctttgttggatatatcctaatgtcaaatgtggcatatctttgttgtctccttctgtctcccaactagagagaacacacttacggctcctgtcccgggcaggtttggttgtcggtgtgattggcttccagggaacctgatacaaggagcaactgtgtgctgccttttctgtgtctttgcttgaggagctgtgctgggtgctgatgtgagtatgaagtacattgggaacttctcttactttctgggtttgtgttgttgagatgggtgagtctgttgtgctgggggaacactttttaaaaatcctactctgagaaattgtgcttacaatgaaatcattcctaccttccaaagaccaggtgtttcagtgttttttattcttttttttattaggtattttcctcgtttacattttcaatgctatgcccaaaagtcccccatacccaccccccccaatcccctacccacccactccccctttttggccctggggttcccctgtactggggcatataaagtttgcaagtccaatgggcctctctttgcaggatggccgacaaggccatcttttgatacatatgcagctagagacaagagctccggggtactggttagttcatattgttgttccacctatggggttgcagttccctttagctccttgggtaatttctctagctcctccattgggggctgtgtgacccatccaatagctgactgtgatcatccacttctgtgtttgctaggccctggcatagtctcacaagagacagctatatctgggtcctttcagcaaaatcttgctagtgtatacaatggtgtcagcgtttggaagctgattatgggatggatccctgcatatggcaatcactagatggtccatccttttgtcacagctccaaattttgtctctgtaactccttccatgggtgttttgttcccatttctaagaaggggcaaagtgttcacactttggtcttcgttcttcttgaatttcatgcgtttagcaaattgtatcttatatcttgggtatcctaggttttgggctaatatccacttatcagcgagtacatattgtgtgagttcctttgtgattgggttacctcactcaggatgatgtcctccaggtccatccatttgcctaggaatttcataaattcattctttttaatagctgagtagtattccattgtgtaaatgtatcacattttctgtatccattcctctgttgaggggcatctggattctttccagcttctggctattataaataaggctgctatgaacatagtggagcatgtgtccttaccggttgggacatcttctggatatatgcccaggagaggtattgcgggatcctccagtagtactatgtccaattttctgaggaaccgccagactgatttccagagtggttgtacaagcttgcaatcccaccaacaatggaggagtgttcctctttctccacatcctcgccagcatctgctgtcacctgaatttttgatcttagccattctgactggagtgaagtggaatctcagggttgttttttattcttaatgagcgtcttcatgaggtaaagaactttctgcattaaaaaaaagtttcactatagagaaaactattcttgtttggggcttaaatttgtttttattaatattgtacagtggtggtggtggtgtgtgccatagcacatgtgttgacctcaaaggacaactttgtggaattgggtctgtctttctgcctgtactttgtagggatggaacttagacttggaaggccttgacccttaccaccaagccatctcaacagcctgaggggggaaaaaacattcttaacattgcctccctctgagttttgaagttaacagtttaataactttgaaactctacttttctacatctgacatctgtgtgtggttatccttttggacagcagccaatattcccatctggcctgtgtttacaaagcaagactctgagagtacactattagagaaagaaagaaacatgtttaaatgataatattccatggttctaaacaattttttatttttcttcatttttaaaaaaattttaaaattataatataattacatcatttcccccccccttccccaaaatcctgtacatcttctgcctcgctctctttcaaatttgaggcatttttttcattagctatggttatatatatttctaaatacaacctgctgtgtgtgtgtatagttttactcatgtgtacgttttccgagctggccatttggtattggataaccagttggcacagtcccagctttccgtagttgcgtatagttcatggtgtagggatgaagccctgagggttttctcctttctcctttgtctcttgttattgtctttcttcagctcacattttggcagttatgctactgagactttatgggtgtaaattctgacattactaggaaatacagtctcacagcaaacaccctggtcatctggcttttgtgatctttctgctccattttctccccttccaagtatgagggcccattaacaatgaacattgctcttgcaatggaaaacttgctctacttacctttattacctgagctcttttcatcaacagactctcttccttgtctgatgcttctgagtgtcttctcttctgtctccatctgcaagtcattccattggcttggaatgcttgaagattctctgagccctgagtgcactggatagtgcctggctgcagtagccattcttgtttgtcaacttgactcccatctggcgttaactaaaaccttaaaatggagggatttttgcttactttgaagtgggaagatctacttctaatctggatctttgaggtaggaagacacacctttaatccagattttaattctcatcaaacctgggccatgccttctcttctattagaagcctatacaagacatgaagaagaaagcttttgctctttgcctgcttgctctcacctctactggcaacctatataaggacatggaagaaggaagttttcctagcaattctatttcttcactagcattagggcctacttcttcagaattccaaggtgtactgaaaaccatctaagtcaaccagcgttgtgaactcatagattctttggacattccatttttatccagacattgttggattatctggatcacaacctgcctgcaagccatatatatatatatggagagagagggagggagagagagaaagagagggagagagagaaagagagggagagagagaaagagagggagagagagagagaaatattcattttctaagttctgttactttagagaacattgactaatacattggccatgaccacaaggatgcattgaatgctgttatattactgttttaatattttttttcagtaaaatggtaggcataccaccagaaataaagtggaatataaaacaagaagtttgattctgatttgaaaagaagatactggaaatgtccccagatattactgaggtaccacaaactgaggtaccacgctttagagttgattagccttacaagatagtttcagtgtgttcttttactaagacagtatcttcagtccccaatattagctaacacttccacggtggaaccgacatctttgtctagccctaaaaccttctgaccttaaagcctcagtcatccttgatgcttctctttttctcacctatatggctgatcagttgccaattgtttcttcaagtgtcctgtgaatggtcttactgtctctcctttctctctcttgcttcccctttctgactctaaacaaagatttatgatgaaacatctagaagacattgattcactgagtggtaaacctccattataccccttctccagttacacacacacacggacacacacacacactgacacacacacacactgacacacatactgacacacacacacacactgacacacatactgacacacacacacactggcacacacacatacactgacacacacacacactgacacacatactgacacacacacacactgacacacacacacacactgacacacatactgacacacacacacacacacacacactgacacacacacacacatactgacacacacacatacactgacacacacacacaatgacacacacactgacacacacacttatacacacttacacacacacacttttcacactgttttggcattttaactgttttgggatgaagggcactgcaacctcattatccctctgcctggcactaagcacattgttgtttgaatttgaatttcagaaaccactttgtctgttggcactgccccttcagctttcccatgcctttgcatttctgaggctttttatctgagcctctcaggtgcctactcaaagaactttcaggtcaaatgtctcagagctataaaagccactttaagtcccccatccctaggaagtctccatatctgtagtcagttcacatgatgctggctctcttaacactcatgttacaccagcttctacctgagtggggtttttgaccttctaacttattataatgtctttagcttgcacgggtcttttcctaagtggatcctcttacaagttctccacagtctgatagaaagactcaaaaaagccagtatgtatattggaggagcttggtgtttatgggatggacagttgagatgtagtttgaacttaagtattccatcccattaatagagatgaatacaaatttaataagttgtctgttgtaataatataatatctgtcaccacagatgatgggcagatataaagtcatgcaatttctaaacctaagactgtctgttacctcagaagtgataatggcagtcaatgtgaagaataattgatcatttacaatgtatcatccaagcacccacaagcacttctgtacacctccagactcccccatcactccatacaccccagactccccatcactccatacatcccagactccccagaccctgcttgcctagctacaaagcagtctgttcttccttctattcactgtacttgacttttgctttcctaactataagggctctaagtacatattcgtttagaggaaaaaaaattggttctcactaagaactccaaggacaaaggtcatatttgcattgcaaagagttttgagacaagtttatgatggaggagcttaaggtatctgtgctggcaagcttgcaagcattgaaaaggaatcactctccaccaatggaaactcttgcttccaagtgggcctttgtcttaagtaagtcttaggataatgattgtctactttgtgactagctcatcctgttgtggccttaacttataggaagttctttctcaagtttctttttatctaaaagaaaaggaatccaacggggagccagactcatgggtaaaaaattgtgcgtgtcatttattatctatctaacaaacttctgagaccttacatgccagtaatgagctgtaagtgatcattataggtgactaggatacactcaggatacaggaaaccacataaggcaactagaaaagggttgtaatgaatgtaaaagagtttaaggcttttaacaagacatatatgatgccatactaatctttaaaaacttacaaagaaactgaggtaaagttaacttacaaagaaactgagataaagttaaaaaaatttatttttacaaagtaaaatgagattagattttcgcaaccaccatgagttcctgttcatggaaagggcatgggtcattatgtgaccgagaggtaagagagaccagggcaggaaaagcattaaaggctgtcctaagaaaaacttgacttgaaaacaatagcacttgtgttttaaaataattaccctggctgctgtattgggaatcaaatgtcagataatgagattaggtagggtcttggaatcctactatcagaaaggtgcagaaatcaccacaggagatgataatgtcccagatggtacggaatctctggggtggtgagaagtgattaggctctgaagatcagtgaagagacagcctataggactagctgatgaatcagacgcagggtgagagaagagtgaagaatggttccaggattgatgctctctgcctcaacaaggctggtgtagagggagccacaaagggggagccagcagtgaggaagatgcactagggtagaatgagaagcaatgagaatcagaattatggtgatgccacaggaaagcagaagggacagggaccatctaagatgcacagtgggcgtagaagcaagagggtgggaggaaagtatggaatgactcctaatattctggcatgtggtggtggtggtggtagtagtagtagagtagtagtagtagtagtagtagtagtagtagtagtagtagtagtagtagtagtagtagtagtagagtagtccccttgggtggctaaagaagaagggaagctgagccagtggtgagtggcccaggtagcctattcatcactagaactctggctcttgtcaccctgtcactgtccaaaagtgagaacgttggcaagtgccaactactgtgcgtgaagacaataacttttcaagttatgcattttgtaaggaagacttacatggtccagacatgttgcaatcagtacctcaggtctgttgcttcccactttgttcttcccatctctcatccctgatgccatgcaggctgtggcctacgtgaccattaagcaggtccaatctctacctccagctttatactgtctgcccttccacatcttgaggaacttctctgggcactctagcaggcatttcagatctaatggatgttcctagccctctagtgtcctaatgactccatccctaagcccaggaggtctgtatttccttttaattacctatactgtcagcaatgtcctacaggtgtttttttgttttttttttgtttttgttgttgttttgttttgttttcaaaaacatagctctaagaaaatgggctagtctataacagatcaggctttattgctcacacacttcgctgggttctctcctcaaccttatctgaaataccggatgtggctgacatcctgtagttcagtaagtggagactgaagagcctagaaatgttaagagagaatctcttccttcaaaagaaacaagcaaacagacgggagtgggcagatggtgaggcaagtgccaccaacaggcagtgagcgctcagcaaacatcaccttctgaccttacttggttactctgtttagctttgtaaaatgtgaaggggttggacaaagtttaaaagactcggttctccctttcacagcggtaacaattggcaacaaagttctggctggctcggcttgcctctcacatccacaggtctgactggcaggaaagagaaagaacgtcctgctggtgagcgaagaagctggatttggaaagtggtgagacctggagtaaaatccaaggtcaccctctgtgtcctgcaggctgcagcgtgtcctataatcagagtgcctttttttttcaaattattttaattattagaatgtgtaactattagaatgtaaagcttttaagtatgcaaataaaaagtttaaaaccttggtatggtgagatagcctagtgagtctagattcttattgagccagcctggtgacctaagatctattcctaaacctcacacaacatgaaaggagagcaccaacttcataaagctagcttccagatgcataccatggcacttgctcctacacatggctttgttgccaataataataattttttttaatatttcagaatctgaaaaagaaaagaaaactgaaagactgcttttagagtttgaaagacaacattgttgagataattatggaactgctgagtcaatgtaattcctagcaaagcacaccagttccttttgtgcagaatagacaagtctaccctaaaattcatacagaaactcaagagagagaaattcaagggaaaggaggaggaagggccagagggagggggagagagaggacttcagaaggaacaaagctgacggccttacttcctaatttcaaacttttcacaaagctacagtaaacggcactatgtgatgggggcagagaacagacacagacctgagcaacatggatgcaaagtccaggaatacaccccacgtttatcatccaggatgctgggataattctacagagaaaggacagtttagttttttaaaataaatttattggagtatgtgcaaaagaaccttgctcatacacaaaaatgaactcaaaacagattagagacccagatatgaacagaacagacttagttcttatgagaaaatgttagcaagtaataaacacatttggcttattatacaatgcaatatcttcccattatgaaaggaataaagtattgatgtgtgctgcacaacagataaaccttacatcatgctcagtgcaagaagcaagccacaaaaggtcaagggctactcaatgtcatttctatgaaatgtcaacacaagcagttgaccaacacagatggacacctgccaggattctggaaaaaggaaggggaaatgggactatttctgagtgaatatggttccttcttttagtggtaattaagatttgccaaattaaatagtggtgttggttagccaactctatgcatatactaagcagtccaactgaatgaatagtgtgccaagagtttacattaagtttatacggcctgcttttgtgtgttaacaacattttaataaagctgctgaacatttaaaaataaatttaatgaacacatctttaaaaccctccacagatcacgccctccactagcccagcaccctagtgcaaatgtatacagtgccctcctaaggctgcgttgcagctcatccttccaaagcagtctactctctaaccaaagcaccgtcctctctaaaaatgcagacaaagtccccggggctccagagcgaagccctccaccggcttactggctctgctttcccgggcctgaggcgtgcagcttactctggctaataaagcctcaagacagaagggttgacagcagtgtgtcttcccagctggcttcaaacatgagcactctgtggatgcagaaaacctgaggtcagaagtgaaacaggagatggagccacactgagctagagcagggcctgccagtcatacctcctgtcccctagagcagggcctaccacacctcctgaccccggcagacctgagagctctcataaaacacagacacccacccaatcaaaatggctatcgtcaaggaaacatcaaaacaacagatattggcaaagatgcaggcaaaattaacccttgcacactgctgatgggagtgtaaattagtacagccactatggaaatcagcatggatattccttaataaaacaactaaaactggcaccaccatatgatccagctgttcccctcctccaagtatacccagtgaagtctacgtcagcttccaaatattcatatatccatgcttattgctctaccatttatagtaagcaagttatgttgctgacccaggtgctcactgatagataaatggaatatatatacatacatatgtatatatgcatatatgtatatatacatatatatgcatatacatatatatacatatatatgcatatacatatatatatatatatatgaatgatgatagaacattagtcagccataaggaagaattcaatgccatttatagaattgctaatgaggaagggggcaatgaggagatgggggaagtggcagatccagtaaatggactaaacataacccaaagtacattataaacatacctgaagagttacaatgaaatccattgtgtaagacaattaacagttagctgataaaagtctttataacgtggaggtaaacattttcagcatacagactctactaagcttctttgaggtatatcttagaacaagtaataaaaattaacctcaatttaatatgtccaaaagaataaaaagtgggtcagtcacggtgacacttgcctgtaatcctagtacttgaaagtggaagcaagatcaggagttcaaagtcagcctatgctatgtaacatagatagaggccagcctagacaatctgagaccctgcttcaaccccccctccaagaaataagtaatttgaaagctaataattagaaagctcattaagagacaaaccatacaacaggcacgttgggggtggcagcactcaacagcttcatgctttctgcttagtcaattaatacatattgatacaccagctctggtctcctgagccctgttctccgggatcacgctccgcgagttccagtccagctacagatgatggcttattattaggtaaacaagactgattttggtactgactgagctttagaaagtgacgtggaggcccgcaaggatacggatgattgccagtgtgggtggctgttgctgtccaccctgctctccagaaaaggccatgcgaggagcaagaagagcagctcatttgaattcagaaagagtgtcgtcttcctccttgctgtgcataataagctcttctccagaaaagcaacccgcagcctctcttcttgtctttgctcctccattgtcacttgcatctcccataagattggattctgagtcattaccctgctcttgggatgagttaaactctcagagactgaaaaagcgcgcgcggagccctgagactctcaattgtctgtttcagattgacacagaccatgctgctcctgctgccgatactgaacctgagcttacaacttcatcctgtagcaggtaggaacggaagatgggagggtcctggggacgatgagcaggtggtggctcctagccaaagccggaaatgagtatctgtgggcattcttttagagggagtgtggttactggatatttcaagtagcgaaaagaatactttccagggtattattgatccatctctccccactacccaatgcttgcaatgaattacatgtgtctgaacgaactaagaggccgcttcctttaatgtaaggtgccaagcagctacccttttgccctctatcagggacagtgactgaggcaaacatagagcacttcgttactcatgtgagttttttttaacaagcaatggcggcagccactggtcatttaataccataacgtagacttgaattggaaactcggagacaatagacccccaatgaaaactcagtcagaaggctatgcctttgaacttgatgggacataccgtggaggatgtggtttagaagggagaaagttgtttcagaattgattatttccctggggaaggcatttcagatcactggtgtgtgccatcagggctgcagtaccaagagaacattgggtttaaaaaaaaaaaaaaaaaaaaagcaacagttgtggggctaagggtgtggctgctccacagcaggagcgtgaggctttccttgaggggaatcatgggaaagtggtactttggcgttggatagccttttgataagtggctgtctcctctcccatctcattctgtccggggggtcagcccacgcttctcttccacgcttctcattctttccctgtgggctgcttaggaaatgaaggagctagggaaacagggatggcaagttttggttttgttgttttaatatttttgttttttgttgcgccgccccgccgcgccacccccccccccaacacacacacacacacacacacacacacacacacacacacacacacacacacacacactggcactctctgtaggggaaggactgtttcttttaagaaaagcagcactaggcaatcacagtctttatgagctctgacgtatgttgagggagcgggaaggatggtggaagcaaggtatgcttacattcacacaaggacggatatgtggcaatgtgcaaggcagcttatgtctcattcagtcttcacaacactcatttggcaaggagagaggctgagacatgggaaggtgtttcaatgtgcccgagatgacatagttagttactaggtggcatatgaaagattttcacacgctgatatcctttctgcccttcccctgcccctattatagtgctaacagtactaaataaattatgacagtagacaataaattgtgaatcgtctaactgggggtgggatttttacataagttttaaaatggagatatatatttttctgttttccaattagatattttctttatttatatttcaaattttgtctcctttcctctccaaaaacctctctatcccccccccccatgctaacccacccactccctgtcctgccattctcctacactggggcattgagccttcacaaggtcaagggcctctcttctcattgatgtcccacaaggctgtccctctgctacatatgcggctgaagccttgagtccctccttgtgcactcttggttggtggtttagtccctggcagctctgggggtactggttggttcataatgttgttcctcctatggggctgcaaaccccttcatttccttgggtcatttctctagcttctccattgggaactctgtgctcagtccaatggttggctatgagcctccactcccgtacttgtcaggcactggcagagcctctcaggagacagctatatcaggctcctgtcaccaagcacttgttggcatccacagtaatgtctgggtttgggaactgtatatgggatggatccccaggtgggacagtcactgactggcctttccttcagtttctgctccaaactttgtctctgtgtctcctcccatgggtattttgatcccccttctaagaaggactaaagtatccacactgtggtcttccttcttcttgagcttcatatgaatctgtgaattgtatcttgggtattctgaacttctgggctaatagccacttatcagtgagtgcatatcatgattgttcttttgtgattgagttacctcactcaggatgatattttctagttccatccatttgcctaagaacttcctgaatcaatcatttttaattgctgagtagtactccattgtgtaaatgtaccacattttcttgttcaaggacatctgggttctttccagcttctggctattataaataaggctgctatgaacatagtgaaacatgtgtccttattacatgttggagcatcttctgagtatatgcccaggagtggtatagctgggtctgcaggtagtactatctccaattttctgaggaactgccaaactgatttccataggggttgtaccagcttgcattcccacagcaatagaggagtgttccatatccttgccagcatctgctgtcacctgagtttttgatcttagccattctgactggtgtgaggtggaatctcagggtcatttgatttgcatttccctgatgactaaggatgttgcacatttctttaggtgcttctcagccattcggtattctggagatatgttctaatgtgtattctgagcatttcacaaaccaaaacatatgttatgagttgtgttgatgaattaataaaaagaaaacccaaacagcatgttttgctcgctcagtaaacttagaattcctgtctactctttctttgcaaaacatttttattaaaatgagtgttaaattagaacgcctccttgtgtgttttaaccgcatcgttatgtgtctttctaattaaggtattttgatttcttagaaagctattggtggggcacctagaaaacaaagcttaggaatgctggtggttattcaatggtgattgaaagggaaaaggcctgggatagggaggaaaagggaaactacagtatcattgtgtgtttgtttaggcttttaaatagaaactgcgcattcaggtattatttacaaaatacaaagtacaaaaatttaaagaatataggagagtttttaaaagatcctgagagtaggggggctatgatactcattgcctgagaggactccctggttatcacgggggcgggaatgatgaccccaattctgtaattgcttggtgtgtagcccttgacccgtatcttccctgaacaaaacagttcctacccaggagttatccggatatgattcctcattaccctctatgcataaatttctaggtttaaattttaaaaaatgcttagcggatcatttagtcgttacagacagacagtagcattcctaatgctctaaaatagagaaatcacggtccacggcaaggatatgttattataagcatggaagtaaatacacaaacaagctgctgcatccgtaaaacacccaggaggaaggatgacacacagcacaatgcctttttcctaagtctgctgttggagcatccctcaataattaggtgaagctgaaacaagcaagacatcgagaagcaccggcctcagtatcagttacctctggaagcagtagaggtgtcattagttatgctctagttcttggatgaggggtgggctcctggatgctcattttacttacaggaattgcgttaataactctcctataaatcaccctgctgtaagatatgccacggacaccgaaaaccacacaaaacagatacaaacttgacctgaccaaacactgctggaaatacccccagagtgttcatcgccccccacccccaagaactacccctctacagcccaagcaggctgctcctcaaagccctgctcatgtcctcattgttacggccctgatcttcataaaaacaattggctaccgatgattaaaagaaatctttttttgggggggggggggtgtttcgagacagggtttctctgtatagccctggctgtcctggaactcactttgtagaccaggctggcctcaaactcagaaatctgcctgcctctgcctcccgagtgctgggattaaaggcgtgtgccaccatgtccggctttaaaagaaatctcttaaagcattcagacagtatacgttctttgtagattccaagtcagcaaatggaagcaaccccaggttttaagcaactatatattttactgaacacactatagtctatttacctagttgatgggcattgcagctatttcagtgtctgggctaagtgaacccctgcaagactgtagagaagcctgaattgttctgatttcatgatccattaattatcaactctttccttatgtatattctgtaggtatactgttgtgttttattaaaaaaagataaagaagccagggatatgtctgatggaggtgtggtatggtgtgggagaagggggtgcctctgtgggcccatgctgagacatcccttccctttgagggaccagtcatactatggtatagcatagaatagagtttattcagggcatagggaggggagttgagggggtagtagagacagagaaaggcagagagcgaaagagaggaggtgtgggagaggtagcaggagagggagagaggaagaaagaggaggagtagaagccagtcatgaacatatggagagaagagggggaggggaatgaggagagaaagcacaagagagggtagagaggaagagaagagcaagagcaagagagaggagggggcaagcagccccttttatagtgagtcaggcacacctggctgttgccaagtaactgtggggcagaacctgaagaatacatttttatattaaaagtatttaagtttatattcagtaaaattcaccttttcactaagggaaaaataactgtgtattttgacaaatacatggtcatgtaatggcctctgcaatcaaagtgggattagatagtctttatgtaattacttattttttattattaatatacattagattatattgtttagtggaattcactgtgatatgcccacacatgtgcacagcatagtctgcagacacttggctatctgccttctttctcttagtgtaatgcatttgaggttcatgcgtgttgcagtctttatcaatggcttatttctgtttgttactgagcggtgtgtgctctgtgatccagtccccagttgtagggcacttgggctatttcccatttctggtgagtttaaataaagttgctatagatgtttgcaaataggtttctgcatggacatgcattttggacttgttagctatattgaatttctagaccctgtggccattataaacaaatgtataggaaattcttagatttccatggcagttgtaccaactttacaccgtcatcagcagtgtctgaaagtttcagttggccctggtagcaacattgccgtgttggacctctgttacccccacagatgcatggaaataccttgctgtggttgtagctttcagttttccagtggccaatgatgctaagcacattttaatgtgcttattgtctaatcgcgtatcttctttggtaaactacgtatggaaatcatctaataatttttaatttgggttcttcgttttctggcaaagcgtcgagtattccttatttatctgagatataagtctattataaggtatatggcttatggatattatctctcagcttgttttccattctttgaacaaggcttcatggacatactcactgtggtctgacttaagggtgtcatgtttcgtgtcccacacttttgatctctcagcagctcaaatcgaaaggattctttcctaacatctcatagctgttcacgctacatttaggtctgtaatcaagtttgagctagtgtctatacagcatatgggagtgcaagtcaaagacctaacaatgttcacccactgcggccccactgttctccgtcatttcttcagagggaagcacctttgactctttatcacaaagcaatagttcatagttgtgtgggtccactgaccctccttaagctaattttgaatctttggtccgtggcatgtgcccagctttttgtgagtatcctcttcttttgattcttgtaactttacagttaatttactttttgtgtcttttattgcaaaatctaaaactatcttgtagtccagatgtattgaacagatagtatttatttttatatttatgtcttcggcagaaacaaacccgtactttgtatcatggaggtttccctcctttactgccctttatcttccagatgtggacagaagcaggtaggggtggagagggagaatttggccatgatgctgcttgaaggactctggtgcagagcacaccccactcattctgattgtcaatgactcttgatatgtatgagtatgatggctaatattgataattggcttgcgattcagaaccaccaagaaaacatacctgtaagtgtgtctttgagggtgtttccagaaatgtttaactgagcaagagagactcaccctgagcgtggatggcactgtgctgtgggctgccatcttggactgaataaaagggagagagtaagttgaaatgagtgtcctgactgcaggcgcagtgtgactgctcctgctgccaggcctttcctgctgtgataggctgtacctccttgaactgtgagccaaggcaagccaagcccttccttcctcatgttgcttcttgtcagctattcctccacagcagcgatgcaaacaggaaataagacagcaaaggaatggaccctggccagggtaggatttctacagtgaaggatgtcctgtgagatgctcacacacagagccacagagcatgagtctagttcacagaacagttttctgaagagtagggactttgtgaaaaacctcccagtcccttctcatattttaagtacactgtataggaaggcaaaaaagaaaagtaaatttctgttgttcaatagaaaaaagttcaaaattagcctaacaaggaaactatcttgggagagaatgcaaatgatttgttttgtgtttcctggagatgtgacaggtgccagctgtcaccaaggcctgttttcaaaatgctaaattgacctcaggatcaaaaaaaaagactcccaaattatctaagttgggtgtcctttgatcgcttcggaagttcaggtctagattgaagcttaatttagttcctgcacagcaaatgaaatgtaagagaaaacacagttaccttaccacaaagccaaacgtttacctgcctcagtcttaggtgctgtctactcttgctggcagtagctggtagagtcgcagccgagtcatcagagcagagagaggagagcgaattatagctagagatgaatttgtgttccatttccatagacaccactcagtggccttaagcaaactgttcttcttaaaacctgtcaaatacgaacagtatcacctactaaggagggatgacagaggaccaatcagaggatagaagagtccctgggtgttgggaccagtgtgtttaataaaggttaactatcactctttccccagttacacagtgtcctaagtctgcctcacagatcctgggttttaggtttggggcaagcctgagagactgtgtttctaattagtgctcaggtgacgctgaaagcaacgtttcaggtggcaaggtggtcgtcggtgtttgcaactgcagatgtttgatctgcctagttagacttattcaatactgtctgcaagttagaagctccagggaaacggcaagacgaatgtctgcttaccccaataataacttcatctaaagaatgcgaattagggtttgggcattaatatttttttctaagaaaaaaaaaagtctttgctatggtctatggtctagatatatgttcctcaaaggttcctgttcccttatacctccagggcagtggtgtaagctttaagaggtagggtctaacagaagttaattaaatcccaaacgtccacactgataaaaagagtcccatctgtctttgaagagtgggtagttataacgggaaactaccccaagagtatggccatccctttctgcttcttcacacaggcagggctgtgtgctggcgccaagcttcttggagcccccaccaccagaatcttgaacttcagtacacagcacacaggtattttgttaaagcaaccatgagtgggcagaggcagtgtcccagaaggctcctgtgtcagactggctgaggccttctgcttggttagtctaacccgctgacagccagccctgagaaagaattgtgtacagaatccattacaagtggtttcatttcctctgtgattcacaaaaaagctgaaagttatagaatttcaaacgtatgttgcatctcctaaactacccattttgtgagaaatcaagcccaaagctttgcatgtcttggaagctatacctgaggtgaagttagtctaagtaacaagtctcagtcattgtgaagtattccgatgcacggtttgtcaggtcattgttctttcctcttgtaaatactacccccaagcccccaaaagtcacctatctgaaaggtaaaatgtatttctaaagctcaaggcatttattctgcaaggggtgggggtggagtggggttgaaaaaaaaagagaagccatgtgtttataaaaggttggggcaggggatgagggaagttctgcggtaatgacaggggagttccagaggaagttatgggctctctctcctctctcatgagaaaaaaaagatagagcggtaaacagcttagctgttaacacatctccaaatctacccagccagttatcttccttgcacactcctctttccccttcaccacctctctccttgttttccgtttgggcatctgaaatttaaaaggggaaacagactttagtagtagtaaattcctaagctaaatgctcagaaaatagcttagtatatctttgatgagggatgattatgcttcccgccccctagggagccgcagagtggatttgaaacaaagtatcttttagttacaagtgagtgaagggtttagagatgatttctgatttagtcacttttctccctggctggtacctaagtaacagcctggcagaagcgaccttagggagaagggttcattttgtttcaccattggagaggacacaggagtccacagtggttgggaaggcgcggtagcagatgtgaggcagctgtcacatcaggaagcaggaagaaagggatgctgacgctcagctaactttctcggttttacttaacccaggaccccagtccatgagatgctgtcactcccaggcggatcttccctgctcagttaagactcctaggtgtttcaaaatcccatcgaattaagacttaatcatcacagttctcctaagaatggatctaaacactaagtacataagaacttgttatttcagcatgcaaaggactctacagaatggaatcatacaggaattcctgagctacatcctttttttttttactagtatgatccgagggtcttttcagcctgatccagcaaggacacgcatgatttacattgttttgcatagaagcatataccttagagcctttctcctgggccccatgttacacaaacaaatgctgggcatgtgtgcatctcctccacactacagatctgtgtaaaatgtgcattaatgttctagttgtagtcaaagcagagaatggaggtaataaactgtccagtcatttttggtaaagctcatttgtgaaaatcactgtctggtatgctgggtggtaacccacagttgctgattcgtgtggtctcttgtgaagtatgcctcagggagaagtgaatgcaggcaggctaggagtcttctcaccacgctcccctttccctccctgctcctccagaagtgagattaatattttggatacttgaaaaatgccaaagcaagcaatcttattcatttctaaggtttgaaggataatggaagtttgaattaaaagagactggcaagctgagtatggccacaccctggccaccccagcacgcaggaggctgaaacaggaaaggtttgagtccaagactatacagaactatgtaacaagaccctgtcttataaccaaagatgatccaaaagtgaattgcaatgtgaacatcagccagcaggaaaaccaaaaggtttttggagtcaggccagggaacagacaaccttcctggttaattaaaatattctggtttgccacagttgtggtgggcacctagaatctgaggactcagaaggctgaggcaggaggaggacgagctaacagcctgggatacatagtgagaccctgtcagcgagagaaagaaaagagagaaaggagaaaggacgaaagcgaagggagagagggaagagggaagagagggagggagggacagactattctggccaataaagtatgactgtgcattccctacatgagtactactttcccaagaattaaccatcacctgaaagaacattttctgagtccctgctggctggcagacacgggtgatacacgtgctccaccttggtcagattttcccacagaaccaagagatggatatttacctcatacagacagattcatagaagctaaaagccagcccctcccctgctccaaaggtccctaactaatcctggtattgttgggatttgaactcaagctcactaaataaaaatatttttttaaaagcccacaaatatttgatgatcagattattttcttgtatgaatgataaaagagatctatggagtataattcaatccaatcttttgtgatgatttagaaataatttccatgtcttaccttactaccatcattgggatacccattcattactcaaggatgcagcatacaggttcccacaatttctacatgcaaacactgcctaggctgtttctgctgttgcagagttattgtttttttttaattaagtattttcctcattcccaaaagtcccccgtaccctcccacccacccccactttttggccctggggttcccctgtactgggggatataaagtttgcaagttcaatgggcctctctttccagtgatggccgactaggccatcttgtgatacatatgcagctagagtcaagagctccagggtactggttagttcataatgttgttccacctatagttgcagatccctttagctccttgggtactttctctagttcctccattgggagccctgtgatccatccattagctgactgtgagcatccacttctgtgtttgctaggccccggcatagtctcacaagagacagctatatctgggtcctttcagcaaaatcttgctagtgtatgcaatggtgtcagcgtttggaagctgattatgggatggatccctggatatggcagtctctagatggtccatcctttcgtcacagctccaaactttgtctctgtaactccttccatgggtgttttgttcccaattctaagaaggggcacagtgtccacactttggtcttcgttcttcttgagtttcatgcgtttagcaaattgtatcttatatcttgggtttttgggctaatatccacttatcagtgaggacatattgtgtgagttcctttgtgattgtgttacctcactcaggatgatgccctccaggtccatccatttgcctaggaatttcataaattcattctttttaatagctgagtagtactccattgtgtaaatgtaccacattttctgtatccattcctctgttgaggggcatctggattctttccagcttctggctattataaataaggctgctatgaatatagtagagcatgtgtccttcttaccggttgggacatcttctggatatatgcccaggagaggtattgctggatcctccggtagtactatgtccaattttctgaggaactgccagactgatttccagagtggttgtacaagcttgcaatcccaccaacaatggaggagtgttcctctttctccacatcctcgccagcatctgctgtcacctgaatttttgatcttagccattctgactggtgcgaggtggaatctcagggttgtttttatttgcatttccctgatgattacggatgtagaacattttttcaggtgcttctcagccattccgtgttcctcagttgagaattctttgtttagctctgagccccatttttaatgaggttatctgattttttggaattcatcttcttgagttctttgcatatattggatattaatcccctaactgatttaggattggtaaaaatcctttcccaatctgttggtggcctttttgtcttattgacagtgtcttttgccttacagaagctttgcaattttatgaggtcccatttgtcgattctcgatcttacagcacaagccattgctgttctgttcaggaattttccccctgtgcccatatctttgaggctttcccccactgtctcctctataagttttagtgtctctggttttatgtggagttccttaatccacttagatttgaccttagtacaaggagatagaaatggatcactttgcattcttctacatgataaccgccagttgtgccagcaccatttgttgaaaatgctgtcttttttccactggatgtgtttagctcccttgtcaaagatcaagtgaccgtaggtgtgtggattcatctcagggtcttcaattctgttccattggtctacttgtctgtcactataccactaccatgcagtttttatcacaattgctctgtagtacagctttaggtcaggtatggtgattccaccagaggttcttttatccttgagaagagtttttgctatcctaggtttttttgtattccatatgaatttccagattgccctttctaattcgttgaagaattgagttggaattttgatggggattgcattgaatctgtagattgcttttggcaagatagctatttttactatattgatcctgccaatccatgagcatgggaaatctttccatcttctgagatcttctttaatttctttcttcagagacttgaagttcttatcatacagatctttcacttccttagttagagtcacgccaaggtattttatattatttgtgactattgagaagggtgttgtttccctaatttctttctcagcctgtttatcctttgtgtacagaaaggccattgacttgtttgagttaattttatatccagctacttcactgaagctgtttttcaggcttaggggttctctggtggaatttttagggtcacttatatatactgtcatatcatctgcaaaaagtgatattttgacttcttcctttccaatttgtatccccttgatctccttttgttgtctaattgctctggctaggacttcaagtacaatgttgaataggtagggagggagtggacagccttgtctagtccctgattttagtgggatttcttccagctgttgcagagttatttaagtcaactcattgtttaaaatacaagcaaacaggttactttgtataggcagaaactcagtaacacactagtataaaggaggctaggaacaaaagcaagcactgaaaaatcaagcagtcctactaagttcttgccaatgcgagtcatcttccaaggagctccctaccttttgctaaagaagagatgttcattccaaaacaatagagtcgagttaggaagcttgtaggtgaaggattggaatcaaattgagaagggaataaatttctctacaaacaattcacttcccttcaggctttggttttgtatgacatgaaattatctcgcatgtctctgatgagattcatctcaaattttggaaaatactgtgaatagaaactgcagcttttcaggtcaaacaccaatgggccctaaattgctaccatatgaactgtattcctaagaatacagccaatgtctttgaacaaaattataaaatcttaatgaccatacatgtttcaggtcatagtgttaggtaatacagtaacaaagtaccttgcatggaacttggcctgtagtggttaaaaatagcccccccccccatcacctttgactttcttgatccaagagtgaacatcttcactgaacttttatgacttggtgattaacagcatgtgaaaccttgagaaatcctggaccagtcttagctatgcactcttaggcaagtaatttaaccattctatgccttacttcattttaaaggcggtaacaatgctgcctgtctccctggcttctagggggactaaaagggatactaatgtatctatgagctctgtgaacaataagaggtgttgttactatcgctggttggaggtggtgatgtttggcaaagagaggtaaaaattgacttcatacaaactaaagagagtcagcccaggtgattgaaatataatggtaataaataaggcagatcgcagtggtagggcagcctaaagaaaggtttggtctcaaaagaggaaatgctctgggttgactgcagggccctgaggagctagcgggagatgttgttgagggcaagcaggcctgtccatcagaagttcctgctggggtgttcaggagaaacaggagtgcgatcagctgtgcgggtgggaatgttcagatgagaaaaccacctccaggtcccgaggcaagaactccactgtttctatatgggatgaggggagggaagagaggagcccagagaatggcgaggatcttctaaaagatgccggagggagggagcacaactctcattccagaagaactgaaacgttgacataaaagcagacaacagcgagctgtgtctcccttgcagctttattcaccgtgacagcccctaaagaagtgtacaccgtagacgtcggcagcagtgtgagcctggagtgcgattttgaccgcagagaatgcactgaactggaagggataagagccagtttgcagaaggtagaaaatgatacgtctctgcaaagtgaaagagccaccctgctggaggagcagctgcccctgggaaaggctttgttccacatccctagtgtccaagtgagagattccgggcagtaccgttgcctggtcatctgcggggccgcctgggactacaagtacctgacggtgaaagtcaaaggtgagtgtcccccgcaagtcatctctgacggagggctgtgatagcttacacaacagcatgggtagctcaggccaaaaccagagaccgggtcttaagaggcagccccttcaaaggggcacctgagcggaaatggtttttggcatctggtataagatctaagtcaaggtaacgggggttaaagcttacaatggagccaggggaagccaggaaaatgagcagacaccaggcctcttcctctgctggactcggaaagtaccggctgaaataacctactaatggagccacatctgtgccttcagctccattcccaaggggaacttggaaaccggggaatatggctacctggagtcaagaacatactgtcctgactttccaagaggggaaagcttttggaattaaagtcaggccctataatataatatccataagctgtttaatgacagattggaagcaaccctcaaagatttatttcagtggttgtcttagtcagggcttcaagtgctgtgatgaaacaccatgacaaaaaagcaaactaggaagtaaagggttgactcagtttacacttcccagatcacagtccatcactggaggccatcaggacaggaactcaagcaaggcaggaacttggagactggaggccatagagggtgctacttactgctctgtccctcatggcttgcttagcctgccttcttacagaacccaggactaccagcccagggaaggcaccacccaccatgggctgggccctcccccactgatcattaattgaaaaaataccttaccgctggatctcatggaagcatttcctcaactgagacttctttctctgtagcgactctagcttgtgtcaagttgacacacaaacccagccggtacagtgactatttgaaattcacctggatcctgttaagacaaaagcatataagaacatttccactttattctgagccactatgatgattaagacaacaattgctgtgtgcaaagtttgcccttgtcttagaagtgatgtgggggctgccgagtttgctaagagcatttgctgtgcaggagtaaggatctgaattcaaagtcacatcacctgcagtaaaaacaatttttgtttgtaccctcagtgtcccagagcagtaacaggcaggacctgggagctccctggccagtcagcctagccaaaacagtgaacttaagcccatctcaagagagtgctgtggagaacagtaaggaaagccatcttctgatccttacatgggcatgcccacctagacacatatatatgcacagagaaatatacaccacatactccttatatggacacacactcctgcacacacatgtgcagagtaacattcaccatacaccctccccacacacatgcatacatacaccagggaaatagaaaccatgaaggatatagaaatctaaagtagaaattaatcaatcttttaatgttagagactgaaagctcagcaagggaacaaggtagcaagtcacatcagcaagagtactaaggaagacgtgggtggtgggcagtggagcccctgggaatgtcacttggcagaccgttcagtgagagccggtgacaggaatgaaatgattctgctgctagagacactgtcagagcagagcagagagctaagtcctttaattaacaagaaagctgagagtctgaacggtcatgtcgccagcccttgcctaacacctttcagattcttagccactgcgcttgttatgttattttaccaagccacacaagtgtctgagggaagaagttgatggcatgagaatgtacttcccaatggaagtgtaattacgtggtgcttatgggaagatggcatctgaaggaagaggaagctcccattgatagctacatttaactacaagttggtagctaggagattgctagtatgagaaaaacagatgttgctaaagataaaaggccatgttttcatttggcctactttagatttcactgtgctctagccatagtggaaatcagactagaggttccttaaaaaactaaaagtagtactatcgtttaattgagctatagtactcctaagtataaattcaaaggaccctaagtcagcctaccataaaaacacacaccacatttattgtagaactattcctcttaggcaagtcacagtctagttggccacaacaaatgaatgcataaagaaaatgtagtgtgtatgtttaatggagaattcggccataatgaggaaaataaccatgtcctttataggaaaatggatagaactggaaatccctgtgtaaagagacataatgaagacttgggaagaaatgtataatggtaataggatctatgttttgtactaccattatatgccataggaaaaatggcagggatctttaaaaagccacatttcatactaataagaatccacactctagggagacatgacaattctaaatgtatacacatctgaatatatagcttcaatatgttaaacataaattggaaagatggatattccttccttgaagccctaccctctctcagaagttatttttctaactttttcttttaaattatttttatattttgaaattataattataccattttaatttttttagcaccccaaacacatatctatctttttgcaaagtcattattcttttttcattaattgttgctatagacatatgtatatacataaacgcacataaatacacacaaacacatatatgtatacatatcatacatacatatatatcatacaacctgctcaatctgtacaataccatatatatatactcagtattgaatacccatttggtgtactcttcgctggggaaaactatttctcccactctcaatattccttagttgtctataattgcctttagttttttgtttggagttgaggcctcctggactttttcactttttcctaataaatcccagttctatttgttcaaaaacaattggaaggagaagagtaggaggaggaggaagaagaagaggaaaaggaagaaatagaggaagaggaagaaggggaaggagaagaggaagaagaagggaagaaaaggaagaagagaaagaagaggaagaaggagatgaagaagaagaaaatgaatttgtgcatatgtgagtttttggttcatctctgctatagcagaaaggacaagacatacagaccggaatgacacacttaaccatcctcacctagttaacatgtctagagcaccaactgcagaagacatggtgctttctaggttcgtgcctagccctcaccaatgtagttatctagcaaagaagaacaaagcaaagttattgcaagagaagaacttctcattgagttggaaatcttgaacttttttctttcattcatttttattctttaatctttttttttacagttcagacttcaccctcttctcagtccaccctccaactgttccacatcccacacttcccacaccccactcctctgtctccacaaggatgtccccatgccccaccccaccagacctccccactccctggggccccaagtctctcaagggttaggtacatcttctctcaactgaggctccttgggtgtaaatatctgcatctgactctttcaactgcttgttggacctttcagagggcagtcatgatagaccccaatttgtaagcacaccatagcataagtaatagtgtcaggccttgggcttgagctgaatctcaatttggacccgtcactggacctccttttcctcggtcccttctccagttttgttcctgcagttctttcagatcgacccaggaacaattctgggtcagagtttgtgactgtgggatggcaaccccatccctccacttgatggcctgtctttttactgaaggtggactttacaagttcctctccccactgtagagcatttcatctaaggtccctccctttgagtcctaagagtctctcacctcccagatctctggtacattctggagggtcctcccacctcctacctcctgaggttgcctgtttccattctttgtgctggccttcagggcttcagtcctattcccccctgccccgatcatattcctctcttcccctccctgtcacctttcccacccagatcccatccccacccccaattgctttcttctctttcccaagtgggattgaggtatccatggaaactgaacagctctctattcaataacttggtcagggaagaaataaagaaagaaattaaagactcctggaattcaatgaaaatgaggacacagcatacaaatttatgggacaatgaaagcaatgctaagaggaaaattcatagcactaagtgccctgataaagaaattggagagctcctacactagcaacttaacagcacacctgagagctctagaacaaaaagagaaaaaacacactgaagaggggtagaaggcaggaaatagttaaactcaggacagaaatcaaccaactagaaacaaagagaattatacaaagaatcaacaaaactaaaagctggttctttgaggggatcaacaagataaacccctagccaaactaaataaaggtcccagagacagtatgcaaattaacaaaaccagaaatgaaaagtgagacgtaaaaacagaaactgaggacattaagaaacatcagatcccactacaaaaacctatactcaacaaaactgggaaatctagatgaaatgcattgttttccaaacagataccacataccaaagttaaatcgagagcaggtgaactatctaaacaggcccatatctcctaaggaaatagaaggaattaaaaacctaccaaccaaccaatcaaaaaaaaaaaaaaacccaaaaaacaaaacaaacaaacaaacaaacaaaaaaacagcccagggccagatggctttagtgtagaattccatcagaccttccttcaaagaaatcttgaacttttaaaagtacttccacctctgaaactcatttgctcatcttttcacaagaatattaccccagtccaacttcctcattttatattgttggggataatatctctccaactactttccaatgaaaaatggactgtgaaggcatttctgataatgtaactgtgtagggtgggggtttccatctcttcctgaaaccatgatggttcctttagctaactatctatcctttccgatgatgtgtcctttcatttacaccccacaaggcaaagtctcagccaagcacctggctcctcgtccttccccttctgaatcacctttctttgctcagccaagatcagtttcttgtttgaagccctcccatggaagttgcctggatcgcccctacagcaaactactccaaaaattcgttttccatatttaccccccaaagtcacaaaagtagacataagatacagtatgatatagtgaaatatttctaagaagatgctgaacccagagaaaatgtatggctaatctagaggtgaaatgagtacttgacatttttacttcagatactgtttgattggcagagacagcccaaaacttagttccaagggattgggaggactagaccaaatcatttagtagacagtttcagagtccaagtctctttgaattctggggattgctagattgataaagagaaggcaatctttctgtttgtgttatttcttggcccattgtggtatttttaatacaaagtgctatgataaaatgcagaagttcacatctctccatctcaaggattctactgtttccttgtttacaagctacgaatccaaaatttaccaacctcatacagttcttgtatactttaaataagataatggtcgggttaccaggctagggccacattttatggccacttaacccctcctcttctcaaagttttaaaaagtgtgagcagcatacaagaatgcaaagccatattggaagtgaacatcatgtgacaggtgaatggtggcctggccacatgattttcccctcgcctccctatttggagcatctctgggtgacttacatgggagagcatgaataagagcaaagaccctcttcttccctgccctctcctcttaatctagaagcacagattttcactagaccctgttctagttttatttctgaggcttggataaaataccttgaggaaatacaacttattcttgaagggattgtttggcttagagttccaccttgtattctttttgagggaaaatcaaggcaggagctcagatcacacccagagtcaggagcaatgacaaatgaatgcatgcacatttgcttgcttgtgttcagcttggtttccctacttttatgtagttcaggaccacatgcctaggaaactgcaccacccacagtgggctgggtcttcccatatcaacttaattaagacaataccccatagagatgcccaccaaccaactcaatgtggacagcccctcattaaggtgcttgcctcagatgattctagattgtatccaattgacaattaaagtttaccattacagaccctaatccattcataaaagataagaacatctttcttatgcctggggatatagtacagcagaagagcacttgcctaacatgtacagtgccctgggattaatccctggtgatggaattaatctctggggaaaccctgattctctgtgtctctgaatataactagtcaaattaataagttattacatggaagcagaacagagaaagacagagaggcaaatcacatgggaaaggctctgagcatgtcttcctcctcactgttctacattaggtaaaaaggtcatgccgcaaagcttacagttaagattctgtgagtgctataggtatttaaggcattaaatacataggtatttaaggtttttcacataactgttatccacctgggtaaagtcatgcagggtctataatcccagcacttaggatacggacaccagagggcagcaaatgtaaattcatcctggaatacgtaatgaggtcaaggctagcctaggctacattgagagagcctgtctcaaaaacaaaatctaaaaaatatagttgctattagtttaatatgaaatggtctttccaatgagtgttatgttcttatatattccagcagtttaagaaactaccttatcacacctgttatgattgcctttcaccactgtgatactgcacttgacataagtaagtcaggggagggagaatttattttagctcacagtttcagaggatccagtccatcatgatcagagggatacagcaaaagagaactcccatcatggcttgttttctctttagcttgtttgggttcccagcctgtgggatggtgctgtctatgttcaaggcagacttcccacccactagataactgagcttcttgtccaatcaaattgacaagattaaccatctcaacaactgtggttttaacttcaagattgcttttacttcaatgcctgtactacttatttaaggaaatatttcccagttaatgaaaggcaggactcgctcccccttccatcatcaaaaccccatagttgattgtcaacacttccagctatatacatgtgtagcggtattcgttaatttttaggtgtggcctaagactgttggacagtctttgtgccttcctgactctccaaatatctccttttgggtttagatttccgtgttctagaaagtagaaaatcacacatgaatagttcatttagtgtgcagtcacagaacatatctgtactgagaaataagaaacacaccccagctctttttttttttacagctcatacatgagtccttattttcctcctcctaatcacaaagataatggagggaaaggaagaacttttgagtaaactttctactgatgctgtctgaaaagtgatctattggggtaatctagccctaaccattccctcagctttcaccatccttcaattatgagactgtttagaatacaagagaccacagaatatggcatcctagcacagtgctaggatgtaaatttgtagccttcctactttcaaacattgggtctatccatcttttttcttctgactttggataccactgtcaacctgtcttcagtcaacctcaacaaaaattatgtgtatcaaacaaaacatctttgttgtactgtatgaataaaaactattcaaactatacaagctaatgaacctgagacataggaaatatttttgagtttagaaaaatgtatcacctaagatcaatagtaatcacgtgtttcttcttccattgagtacaactgtacagcaatccaaaacaacatttctttttcttctgttgtccagcttcttacatgaggatagacactaggatcctggaggttccaggtacaggggaggtgcagcttacctgccaggctagaggttatcccctagcagaagtgtcctggcaaaatgtcagtgttcctgccaacaccagccacatcaggacccccgaaggcctctaccaggtcaccagtgttctgcgcctcaagcctcagcctagcagaaacttcagctgcatgttctggaatgctcacatgaaggagctgacttcagccatcattgaccctctgagtaagtgtggcccccatttcctagtcctatcaattagagttcagacgggaaaaatcttaagtgtaacttgtattcacaagagataattgtcattcagaagcttacttctgaataagctttctagatcattttgaactctggctgactggttcaattcagctcttctggatcaaaattcctctcccagctgactggttcaacctgagttctcttggcttctgactgaattgcccacttggcctcaaactaaccggcaatatgtttaatcttctgtttccttctcagtctctggatcgttctgtcttcacctgtctctgtaaaactgcctcctctctctcctctctctgtgtctctctgttgctgtcatctctgtctctgtctgtctctctctccctccactgttctctcttaagccacctctcttccctgtcctcatgagagttgggcatatcctatctctgactcattctgtcaagtctttctcagatttgtcactttgtctgcccctcgttttcatacatggctgcttccttctacaaactaaccaaatcttcaaggtttggaattaaaggtgtgtactaagggtgtgtctgtattccagatatagagattaaaggtgtgtaattccagccagattacatagatctaggtttttggatgtgatcccttgccaaagcagtcatgttgctggattaaaattcctctacaagaaacagatggtgcgctcatatggcttgttcaaaaaggggttctaagagactcttcatgaagtcgagatagaatatcgaagaactacaaacatagaatggggcaaagatctctactgttgagaaagagttaccagtgttggagaggctaccaggagaagacagctgtgaggcagctcctctgggagtgcagcttcgaggagggaagtatgtgacataccacaaccactctgcgggtcccccagtgtcctactggtgcctcccattggctggtttgtgtgtgtgtgtgtgtgtgtgtgtgtgtgtgtgtgtgtgtgtatgtgtgtgtccccgtcccttcttcaccatgtgttccctgaacttgatccaaatgtagagaatccacaaaagaagattgatcagcatgggtttaagccaatagaaagtctgtattagccagctgtccatcatactgtgtgtttgagattatggtgtagttaacctttttcagttaacaagaacagttaccagaagcagaactacagaagccagaaataaagcaaggttagttagtacatttagagaatttcctagaactatgaacttggatggataaggtctttgtttttatttgtcagatggggctgtccttgggctgagttttatgacttgaatggcacatccatcatggagtcagttgtgctaaggtctgaaggcatagtaacctctggagctctattacattccccactggccctagagagtgagttaaaccataggctcattctattttagttcaaggtataagggcccgtggttgatcaaatcaggagaatgacatgtgcagtgagcactaatagcagatagttagccaaggggactacgagaacagacactggcatcaattatctgacttagggctctgtctcttttccttccttccttccttccttccttccttccttccttccttcctttcctttgttctttctttctttctttctttttatgttttcttcaaccatagcaagactttctctaattactcttgatcaattagcatagaaacaacaggctcttcccagggctagacatagttttcttcatctcgtgagaagtctaaacctctccaattttataggatactttctgcaggggaatctaactactctccaccaaatagtcaggggtttggtgatattgctgtcatccagatgaatcagcccataaggcagaatagcaggcatcagaataaggtaagctattatgttaaaggttttgtatattaggcaagtttcaggtccttgtaagtcctgtaatattaatttgtgttgatcctagtcacaatgaatgttgtcagtcagtagactgacagtctagttagttcctatccctctgtagtatgagggctgggctgtctaaacataaccagccatcctggccaacttctggctgggagtgatgaactcccgggggcccttcctgtggcataaagtccgattccccaggttttccctgtttcccaaaggccagaacttttttttaaagaagaattttaggaagcctcagtttcacaaccctaatttttacaatggaaacttttttgtttcctggggcccagtgaaaccttaattttaataggtcacagtgcaggagacagtccatttggcaacagtgtctgtggcttctgctttctcgacctggatgtactgaatccatggtgtaatgccagttgtcttcacagccataggagtagaaagaatcactgtgtagggtcctgtccaagttgttttcagtgccctttagggcagccacttgacttgaacaaatagaaactggtggtgaacttggaggttggctgggtctctcagctagtccaagactgagggtctatagtgactggacagaggaatagtcagagagttctgtcaactgctggtctctgagctcgagaaacagtgggggaggtcttccaaatataatctcatagggagtaagtccctccccatatggggtgaaacaggtctatgcaaagcaaaggaaggaggcctatccacccctctcattggacactaatgagagttttgttagggtttctttttatgtcctggttattcttttgacctggccacaactctgaggtctgtatgcacagtgaagttttcagtcagtgcctaaagctttagctattacttaataggttttgggctgtaagctacgttattgtcagaccccattgggagggggaggctaaatcaggggacgtggaggccaaaaggacctggaggagtttttaaaactactatctgagcagtactggaaaaactggcaagtactgggtggtggtggtggttgttgttgttgttttgatcctcctctggcaggctaaatgttggcaaagtcagttttactgttttgtgatgtgttggcctcttatttggaccccttcctgggaaagggctctctgttttgcattttcttgagcacaaacctggcatctggttgaagcctccacactaggctgtccagtctaggtataacataccttgttttgagcagctcagaagttttgtggaccccaaatgagtggcctggtaaaggtcagttgccagaatcctgcctgttgtttctgagagaacagtctttctttctggagtcctccgtcaacctgtgtgtttaagctgtccatttctcccatggattctcagccagtaccaggtcagggtacaccatcagaatacccatagacccattggtcttagggacatttgtctggtagccaggtcagcaggcaggcaggagaacagcagttcatggaggaagccaaatagcccctaggaggacaaagattttctaatgttcttttccccaacaccaagaaaccctctttctctacagatcatgtcatggacatgtctgctaataaacgtatagcaactgctggtgtatatggtagtggactttccccatctgagagtctgggtcagatctattctgctctcttgactgaggcaccaaatttggacccaaatcctttccgttaaagtaactacagcagctcccacatacctgttgtcatctttcatctcctgacagtcacggatgagcacttctgggttgtcagcaggaaagaaggcagcaggataggcagtggtggggttttaaaactggactcgagggtgggccaggagttgggcctggaactgggtcacacaggcattagacagaattctagtgctccttaaaggagggcctcaactgtgccatggggtgttgtgagcataacatcttgacccagagttaacatcattatgatcattattaattagtctagtagtagctgctatatctcttaaatgggtgggccatcctgtggctacagggtccagtcgtttagacaggtatgtcacagggcatttccgtggccccaaagtctggtttaaaaactcccttctgtcttgtttcatcaacaaacacatgagaaagtttcaagacatctggaaagactagggcttgagtggaagtcagagctgtttttaaagcctcaaatgccttttgtttaatctgagtccagatcagaggaccaaagcctgctctgtgctggtgtagaggccttgctatttccacaaacactcgtatccagaagcagcgatgtcctgctagactgtctctcagacctcagactctcaaacctgtccgttagtctttggaattgggatctgacagatggctgcactcctactcacacaggctcttttgactcccttcagctggcggccaagacaagtagcctccagtgtgttttcatagttcgcgtgaatcttctttgtatccagatcatagtgaacgtcatgtttgggccatgacaagtgctgccatgacgaattagaaacataatcagtcataaagaacctcagctccctcatctcagctcctagtctacgtagacagaccagatgtgacaccctgccttgtgaccccaaacaatagcagcaggataaacacagtcacatcctcccaagtggtcctacctcttaaaaccattgtctagctgattcttctcattcttatcaaccgagctactcacccactgctggctgctgactgctgtgaaccacctcagaaatcagtgaataaaacaaatgcagaagtgaggtgcgaggatgcctgctactctagaacagaaggaaggcagagggtgccggacactctagaacagaaggaaggcagagggtgccggacactctagaacagaaggaaggcagagggtgccggacactctagaacagaaggaaggcagagggtgccggacactctagaacagaaggaaggcagagggtgccagacactctagaacagaaggaaggcagagggtgccggacactctagaacagaaggaaggcagaggatgcctgctactctagaacagaaggaaggcagaggatgccggacactctagaacagaaggaaggcagagggtgccggacactctagaacagaaggaaggcagagggtgccggacactctagaacagaaggaaggcagagggtgccggacactctagaacagaaggaaggcagagggtgccggacactctagaacagaaggaaggcagagggtgccagacactctagaacagaaggaaggcagagggtgccagacactctagaacagaaggtggaggatgtctgacactctagaacagaagactgagtgcactaagttttggtcagcaggtagggagtcatcaggtcattttcctttagaaacagggctgtcctcagccagtggctacattttcactggcatatgtaactgggctaggtcatgggattaaccgtaaaatacctggtagagctggcagaaaagtgaagccctcttgggaccgctcaggtaaggagctagaaaagaacgtggactctgaagccagacttcaaactttcaaatgctatctctgccgcctcttggctttagaacttgactaccctacagagccttctgggaactcagtctcacaggtatacagttacagtaaatgatgatacacatgcttaaaaagttactgtgtaggtaaatgaaatatgatactaacaaggagtagggaggccactttgtcacctccagcaagactcctggcttctttctgagtgcatagggctatggtaagaataggatggatatttttttccatcacatatcttatcattgttaaagggaatgcagttatcttaaaataatagaaaagaatatgtaggtcacccatgctgccataatgaagattctcaaacatgcaatgactcaacacaactgtgtatttctctttacataatacttagagagagagaaaacgcttcaggcagctaaacaactaccttccgtaagtcattcaatgacccaggttatttccatattgttactctgtcattctccgggatatcgtccctgttaaattgtcaaatcagggtcattgccaaatctatatccctgccttcagagaggaaagagtagtagaagagaactttgatgttctaagtcaagatctggagaattcactcttagccggaatttagtttatactacaggctatgtttaagtgctgatgaggtctagaaaagcagcccctcagagagctctatgtctaactattaacctagcactgggaaggaaggagcaggtaagattaccagcaggttgctacatggtagctactagagggagtaggtaagattaataaccagcaggttgctacaaggtaactaacatagactagtcaattcagcctaggaactgagacttaagtctctcctgcagtggtgctgggcttcataccagactgagtggtggcttaggagccaactctatcctccaaatgcattctaagaaaactaaagtcttcaagggtaagcagaaattccatacatggaaggatctatgagcagacctggacagaacaagggttcccaaagacgctgaggcaggggcctggctcacagcactaccttgcaacatgcatgtagtagaaaaaaagcagtgtgatcagttagggtttgcaacacacctctacctgttgcatgtaattttaaaaatatgctatctccttggcagatctgctgcgccatccccactctcggaaaaacccattcttcccagcttagctccgccaatggccagctggtgcctttcccaggagctgcgattatgctcccagcccttcccagctagccaccagctactgcctctctctatctctgcccacctctctgagacttagacagctttattaacttagtacttgtcagatagcataattgctgggagcagaatctcattgttcccaagcatggccacaaactcctttctctttcctcctcctcctcctcctcctcctcctcctcctccttggacccggaagttctacctttacccttcacccagcaattagcttccaccttctttattgacacaatcaagaaccaattcagctcctctccctacatctaccaaactggcccttatctttttggttctagcgttcacatgctcttggataaagatgatagctctggggcttgagttttggatcaagaagatctatatctaaaaccctggctgttttacttccttggaaacaattaccatagacagattagcatccctgaggcttccttggctctaaagtgactctggattatatatatatatccttccttagccagattttcccatggtcccatactctgtagagggaaggtcaagagcagagcagccagcagaaataggcatagggtaacttgtgtgcctattctttgccatgttttcaacatctctgtagccctcttttctctccatctggccagcctgaaggtaccagtgctctgcaaagctgttccccagcctttaaattaaatcgcctcttcactaaatggatgtgtcagtggcagcaccttggttagttcagacaagataaggggtaacttgtatctgaatggctggatttaacatgtcagcccattggggatattctgctctttcaaaaggaccttgctggtgtttaaaattgaataactaacagtgcagagtctaggctcttgagttcttatcagtgagggagaaaatacatttttgagctgagggactttttctacttgaatgagaaaatccagatggtgaagaaaagagagatggaggtagagatagcgacagagacagggtgggagggaggaaaaagaaagatgacgaataggtgggtgggtggaacaacaaagcgacaaaaggactgcatcatagctgaatcacctgctgtctaactttggggacatttctcagcctttcttctttcatgggtgaatgtggagatcaaagaagaggctgcctcactgggtggaggtgaaaggaaaagaacctctacttgagagagatgtggaatgaaggcttaacttcatttccacgtggtagaaaccacacaggaagccacctcagtctgtctcggggccaccttgtgatgagattccggttctctcattcacccaggtcggatggaacccaaagtccccagaacgtggccacttcatgttttcatcccggcctgcaccatcgctttgatcttcctggccatagtgataatccagagaaagaggatctaggggaagctgtattacggaagaaggtgagtgacttacaagccatgtaagcctgtggcctgcgggtcttcagagaagcacttcaagcctagaagggttttgagattaccctggggacattctactccaagaagaacatggtccagtcttcagtgagctgaacccacgctgaagttttgtgttgttttattttggtttttttgttttttaaggggaagtttgttccagggctgaaggagtttggcttgccctccaagcttcatggtagccaagttatagaatcagccagattcccatcaatgataaacaattttttaaaaaaatgtgatatgtgtgcataacagagcaccttgtagccttaaagaaaaaattaaatactgtcatttttcaggggaagaaatgaagctagaggtcatcgttttaagccctactcagaaggtgcagacagagattatatttcttttgatatatagattctagacttaaaaaaaaaataaatacaaggacaaggtacccgcacagcggaaaggagatacaatgatggaagtgtatatgtgtgtgaaaagccatgatgattaggctggagaaatggctcctgagttaagagagtcatcttacagaggacttgagttcaattcccagcatccatatcaggaagttcctgatcacctgtaactccagctccaggggatctaaggtcctcttctagcctcccagggagctaagttagtccaccagagggccctatctgagccaatgctgagggcctagtgggtaaggggttgaatgtacacaactgtggccgacaggaagtcccacctgcctcttcagccatatgtgtcttgcacagagaccaatggcaagtagcatgtgaggatgccataactaattcactgccactgtggtgtagagctcttgagtccttgctagagcagagtcccatgcagagcccattaaactttcatggctgatgaggaaagaggggcttccttccttctcgtcagctgcaccatttgccccttctacactagaccctcataaggaacctgagtcaagagctttaacttctctctcttctacagttctttgggccattgttgtcctgagactacagtaaagatagagaagtctccatccctttctttctagaagcctcctcggctcctgtacagatttattcatcagataatcacaacttatgatgcctgctgagtactgggagggcagccattgccagtccataaaagtgtcttattaactattcctttcatagagccattcaatcctttgttgaaggatccagtgtgaaacaatatgttccagagaagttggcaaattctagttctgttttatcagctaggcttaagtatatgggaactatgtttctctcatcagtagatatatgttcaatatctaaaatgctatgtggtatatatatataagataatgcccaataaaattgtaagttttttcttttttcatccctgacaatttcatacatgcatatatatgaacctatcatgaactttagacattccatccccctttctctactcttacctccccttcctttcctactgacgttttctttccaacaagtctcctctctactttctcgttttctttgtgtgggtggagccccctgagcttaattgaaattgtttgcgggagcatgaggcatgagcgtaggttacttattaaaggtcaactgaccggtagttacaccactgaagaaaatggcacccctttccatagcaaccattacctcccaatagtgcctcagaagggggcatcgtggattccttctcatccataatgaaatgtaggcaggaccaatcttgtgcatatttgagcaaatatacaagctatgctgggttcccgagtgcaccagctatgtctgacgttttgttgatcctccccccaccctctgtctctcatattccttcctccccctcttcccatgatgttccctgagtgttggagggagtgaaatagatatctcatctaaggcagtgcttactcttggattttggtctgttatgggtttctgcaatgctcattaaacttgtagtctactgtctgtaggtgagcatgacagacctgctttggccatttgagtagccatatttaaagcattcacatgctgtagttacaggctacaatattggatactgcagacagccaacatcactgcacatcactgcccagcactgtgataaatgtccccctcaactcctctccaaattacaagctttgcccaggacagaaagcagtgcctttattttgtccatgaaggaactgaggttcagaaaatccgtgtgacttcccaaagtcacacaacatagacagttgaactctaaaatgtgtgactctttttatggcaaaagagcttaattgaaaccagcaatctgaatagtattatccatacaagggaagaggaagtcgtaacccaaagaattaaatgagttctcatttacatgctgggccaatcacgaagccaagtcagagtcccacagaagttacctgtacagagtctagatctgtagagcttattaaactacaggtggcttaaatgaatgaggattaaaaaaaacttggcacatgcaatgagcaataatcaattcaaacatacatatataacaaatgcaaggtgcttatggcagttctcattcatgttatcacatgacttcattaaagcatggtctggacatacaacacagtcactttacactgtgcatgctcttctataactgaatgtcaaggatgctgcagaaacaccttgggtccaagttgagactattctgtgttatggcttgcagtgtttttattgtacatacaaagtcttattatctcattgaaatagaataacttaattctaaaagtatatttcaagacaaggtcttatgtcatacaaataatataagacaaagtctcattacatagctctagctgtcttggaactcactctgtaaacctggccagtctggatctcacaatgatctgcctacccctgcctcagaagtgccaggattaaaggtgtgagccactacatgcctatataaaaacacttttaatatttttctaccacttttcctcaatatgtgtcaaattcatataactttatatttagttgcattagaaattttatttctaaagctgatttaattgctagcttgagtttcattaaaaagttatcaatgagttttgggttgttattaggacagaatttccaaaaatttcttaagtgcccctaaatatacttctgctaatttgtgttgtatatttatgtgagaggtgttctctgccattcaccataaaactattaattttaaatacaactaactcactagtataaaatttttcttttgtctttaataaatggtagaattatatatgcacaaagaattgcttttaaataagttaattatttcataccagtaaatgcttagtttctgtagctatacactgtcacacatacatcctccctcacatacagtttcacacacacacagtcacacactatcacatatacaaatacactcacatacaccttgtcacacacaccctgtctttctctcacacacataccctgtcacacacatacacacacacacacacacacacactcatacacaccctgtcacaacacataccctattacacacatacataccctgtctcacacacgcacacacatacacactcacatataccctgtcacacacacattctcccccacatacagtcacatacacacacagacacaaattcttatatacacacctacaccacacatacacacatccccctccacatacacatagaataaaataaaatatgaataaaacttgggactactatgttcttgtgttttcccatttcatacagacctcttagttactatgtagccccagctaatctcaaactagaaattctcctgcctcagcctcccgagcctggtacaggtatgtatccttggcttcctattgcagtttttaagaactcctttacagtgtatattatgaaagtatcaacaacactttgaaaataaaaagcacagatgtaatacacacacacacacatacacaaacaaatctggttcttgccaagatatgggaaatatggttcttaagatgtgtggagacttgtgtgtgcacaagtgtgtgtatgtgtgcatgtacatgtgtgtgtacatgtctgtgtgcatgtacatctatgttcatatgtgaccaaggtacatcagtatgctgtgtgtagaatacagatatcaaccttgggtgccattcctcaggcaccatatgccgtgtttcctccacacaaagtcttccattatgacgtgaggctgttcactgagccccagggatacattcacctcccaggcatgtgctactgcacccagctctttacacagatgctggggatcaactcggcttctcacccgtgtgcagcagcctctttattgagttattttcccagtcttctcccacattttttattagatacaacaatacagcacacttcaataacagaaaaaacggccataattcttataaaagtctctaaggttttagattcgaatattaatcctcgtttgatcatgagctggtaactagcagtttttcagccaacatcatccagcctagggaccagcaccaggttggtgctgccttagaagaccgagtcgggactttgccagactctaaaccaaaagtcaaaggcgttatgttctggctgcctatggctggtggagaatattaaccctgacctctggcagtaagggggctgccactgaaaaccgagacattccagagcagctcctctgagttgagaattgggttcctttcaaataccaatcttcttgaaggagactaccctggctatggcactgaattgatccttgactctgaaagcccaagctaatgtcaggatggtcatgatggaactggtaaaaagccagataggcaggagcagcgcaggacagtggagagccaggtcctagaagagaatctgataggaaatagcaagtgctatttaaggaagaaataaaactagaaaaacctggtaacagcaactcatcgtgcaaacgtatgcttttgttctcttagcaactctgacatcagtcttttacaccttagttagtgtaaattgagcaatcaagccttttgttctattcctggacagccaggtataaagcgtcagtcaaacaggccattcaaaaaagccacgtgggaacctattttacaagtatatatattcttcacctaacctatgtattcatagaatctatatattcatattttaaaagtttaatttagagttactctacatagaggataataataatgtttctcccagaacccataacaaaaacaaaaagccaagtaaaggtgtgggttgatgcccctcctgttgtttgtcatgggtatcctagagactcccaaaacaatacaaactattgccattgctcttgattgccccccagaacctgatggtgagtccttattctggtagatacaggacacagaaatattaagttggccctacccaggaagcttcttccctgctggccacctttcatagtatctcaggaacaatgtgagctgctaggcgtggggtgagccatcaacaccttacccagcggagagttctgtgagccacaataatgcctgtcatggcaatatatacccatgggtacagtagtagcaataatatcacagttatgaacaatctgatattcatcaatattctgattgaatctaaggcccactctataggaggagctgcctggtagttggtattgtatctgtgaccaagaatccatggttggcgagctcagaggtcccggtggtgaggctactacaatgatgttgctaaagggacaacagtaccaatcatttctctaaatttctatctctatcttcatagatttctgcagctcccagaccccatcatgaagtttctttgtgcagtggacagtggttagcaaagaaactcataatggctcaaagttcagagagtaattgtctatggtgaactcagccaaaataggacatcaatatcgcacccttacctctttaggtttacagactgtcttagttaggctttcactttctgcaacaaaacaccaaagggtttatttggtttatatttccacattgctattcttcaccaaaggaagtcaggacaggaactcaggcagggcaggaccttggaggcaggagctgatgcatgcttgctctacatgctttcttatggaacacaggaccaccaccccaggggtgccactgcctatagtggactgggttcttccccatggatcactaaataagaaaatatcctacatctggatcatgatgttgtagaaaatatttaatctcaatccaggttttctactccacctttgaccatttagttcccagataaaagatactcataacctttatatttacaataagccttaatcagcacaagagctgggcagatatttattctccatgctattatgtctatttcctagccaataatcccattaaataatctgccatgttttgtctgggctgctcttaactccagttagccaacccatgtggccattatttcaagattcttaccccacctcagcttctcctctctccaacttcttctcttcccacctcgtggttctcctctgacccaagcctgggaaccctacatcccgcctatgcctcttctgctcagctattggctgtcagcatctttattcaccaattagggataacttgggagtcaaggtcacatagcattatgtgggtctatatgtggtctctgggagtaaccagtatttcgcatagcaaaagaccaaaccttaacattatggaggcatttcctcatttgaggctccttcttctgcaatgtctctagcttgtgtcaagttgacacaaagccagccaggacaggggtcatcaaggagtaagaaacacattattagaggcggaagttgggaaggacagatctagaatagtgttttccggacattaatgggaccactacactcataagtttacagcagctatagagacctgtataagacctgaactagaggatgccttcacaacatttcagcacagatcagggaggggctcgtgaaccccatactcagctgagaagttattgacaggtgatgtcatctgagggagggaggatcagtgaagggtatgggctctggtatgttggccatgctccagtggatggctggatgtcagaggtgggaggatttggagatagaggggtggtccttggggggggggtgttatgggaagatgaatacaacccaaacccattgtatgcatgtatgaaacgctcaattaataatgagatatatatatattggtttttcgagacagggtttctctgtatagccctggctgtcctggaactcactttgtagaccaggctggcctcgaactcagaaatccacctgcctctgcctcccaagtgctgggattaaaggcgtgcaccaccatgcccggctaataatgatacttttaaagtgaaaagagaggagtaattctgaagctagacacttgtgggagttttgttttatagacaacaaattcccccaccacaacagagaagtgagcagagccaagggtgagcagcttgcatttctttctcacctcctttgctatcttagcttgagttgataaattcaattctctcccaatctccacgggaattggttctagtctcacttagattagggagtcctcacgtcccttagggaaaatggcccaatgtttgcagataacctatatacatcttcacatgggcttgaaataattctgattcctgaaaaatacctatgacagcgcagatgcgagctttgtaaatagtagggacattgcattgtttatggaacaatggcagaaaagaagagtgtattggtcacttttctcaatgcagtccccaaagaccagacaagaagcagcttaggtcatggttggaggggtgatagctcatactggagagggaagccatggcagtgtgagcatgtatgacaattgcttgctcacaccgccctaaggccagaagctccagaggaacaagaagtagagacgagctattaacctcaagaccaaaccccagtgacctacttccttcagctaactcccacctcataaaagtttcacaacttcccgaacagcagcaaccggggaccaagtgttcaaacatggaagcctgtaagggacatttctctttcaaataacaaccaaaagtttatgctggtgtcttttaaatgtctgctctgggttatttattgtcagataagcttacctcaagctgacttttctactcatggagaaggtaatagtaatggaatcataaggaaggggagtctagagcaggggtacccaggcctcctaatcctgacaccctggaatacagctcctcaccttgtggtgagccccgaccattagttattttcattgctacttcatgactgtaaccttgctcctattatgaattgtaatgtaaatatctgatatgcatgataggtaggaagtatatcaggttctagggattccaggaacctcctcagaactctttaaccttgtctgtgtagatacaattgtttccacccctgaccggtacttctgaggtgagcttaaaacatctaattctgagccttcaaacatggaagactctgggtaagaacccagtcttaccttctctgacagatcttatttcctatattataaatatatagggaatatataaaatatgaagtatgtgtatatttcatattttaaagcccccccccagtttaagtatattttgtcctacatctttttagcaatggtctatcaccaagatctgctaacccagtgaaggttccagctccatactctgtatggatgttttccctgaagggcattttgagaagaacacaacatggctgtgtccggatgggttcacacatgctctctcgttgcacagcttagcgaccctggctctggctctgtttgaggctctggatagattgtcatgtggaactagctgccgggggactctggtacttgttgccagatgagcatccatgggaaggtacgagatggaacaatgtggtgttgatggtttgaagtgtgactttaacagtgcactgttgagtttttatcttgtcacagttaggattactattgctgcaataaaaccccatgaccaaaacgcaagttggggaggaaggggtttatacagttatatacttccatatcactgttcatcatcagaagaagccaagacaggaactgaaacaggacagaaacctggaggcagaagctgatagagagaccatgggaggggtgctgttcactggcccgctgctcccatggcctgctcagccttctttcttatagaatcgagggccaccagcttggggataacaacacccacaatgggttgggcccttccctatcaatcgctaattaagaaaatgacttattgggctggagagatggctcagcagttaagagcactgactgctcttccggaggtcctgagttcaattcccaacaagcaaatggtggctcacaaccaactgtaatgggatctgatgccctcttctggtcggtctgaagaaagtgacagtatactcacatactcagctgcagtacaactgggtggcagttttgcaaccaacagtgattaagaaatacattgtggggctagagagatggctaggtggttaagagcactgactgctcttccagaggtcttgacttcaattctcagcaaccacatggtggctcaggatcacctgtaatggaatccagtgcccttttctgttgtgtgtgaagacagcaacaatgtactcatatacgtaaaataaataagtaaataaaacaaacaaatcaaccaatgaaacaaaccccactgcgtcaccagagaccatgtgggtgtacgagtgcagcactgctgtgcccatggtggtatccaggcctatgctgctgcctggagtcatgtctaggactgtagtcctgtcccagacagggtctgtgttgatgtctgaggccgatgttaccaataaaatgttgtgggatgccagcctacggcctacgtgaaccgggtatttctggaaggcaggctggggctgaaagagactagactgtgagaaaagaatgatgaagccaagacaaatttttctctgatcaaggctcgtgagtttactaagagagtgtgcttataagggggaaggcccatgtcctcccccgcgccccacccccccagtccatccttgcatccttggtgctttgtcgccatgtcgccatgctgtcagcacttggttgcttattcaggaatgtctcaggaagataggtagcagaatctcagggcagttgacacttcaaaagaagacagtcaagtcagaaagctgcaccgcaggtggccccacctcagtggtgacaaggtctgtaccagcctgcttcaggttcaggctgggggagactacaataaaaggccatgcagacgaccctggtctgggctgcctgaggccacgttgatgttcaagcactatgctgagctggcaaccataccatcccttacgtaggcagtgtgcgagagacggctctggtgccgtgggttcagaagagctgaccatggtggcaggagggcaggagatggtcctgcccctcaccagctgcagcccccaggtaggagagtaggccatgtgcctcatctgggcagcagaatagagattatcctggtgataggggagcaggcatactggccccatcacttgtctgacatggggcagcatgggtaaaagagaaatgcccccttgcccctcaccaactacttcaggtggaagggctggcccccaaatcatgagagcaggagagctgaccctacttctcactggctacagtacccagagagggtgtcctgcaccttgcctgggtagcagagtagagctgggcccctgcaaaagagctggccctgcaccttgcctgctgtagattgggtgagctagccaggaagtgttagagagcttgccctggtggtgagtgtacaggagagcagagaggctgaccaactcatctaccacccaggctcagatgtagggttttgaattggcttgacctcaactctgaactgctggaactgtagggatgctcctacaaatctaaagctgcagggtctccatgacacagggcaacaacaggctgtccaaaggagtccctgtaagggtccagcaggagccagaagccatgaaccagaccaaagtctcatggcaatgttcatttgcaagtaaatagagtggaccaaagggagttctgtgggactgtgggacagacacactatgacacactatagcttccacagcaagggttttattttggttttttttttttttttttttggtattttactttattctagtttattttattctggggtaaaggttgcaagagcagaggtagatactaagggacaggaagatgaatggggttggagtacatgattcacacacacacacacacacacacacacacacacacacacaaatcaataatttttttttaaaaaaactattcattacaaagccaaaacaaaattctgattaaaaaaaaattctttctaaatgccccatttgataagttggaggtttttaaatattccatactaaagtcatcagaggggtttcatgcaacaactgatgggaacagatgcaaagacccacagccagacactagggagcattcagggaatcctccagaaagcagggagggaggactgcaggagccaaaggggtcaaggacaccgcaagaaaaccacagaatccactaagcacagaaagcagggagggaggactgcaggagccagaggggtcaaggacaccgcaagaaaactacagaatccactaaccagggctcatagaaggtcacagagcctgaactgacaaccagggggcctgcgtgggtctggcttcggccctctgcatatatgttatggttgtgtagcttgatcttctcgtgagactcctaacagtgagaatgggggctgtctctgactcttttgccggcttttgggacccttttcctcctactgggttgccagtccagccctaatagatggggaggttcccggtcttattgcaaattgatatgtcatgtttggttaataacccttagaggcctacccttttctgaagggaaatggaggaagggtggattgggggatggagtggggaaaggaaatgagggaaagaggaagggtaaacggtggttgggtgtaatatataagaaaagaacaaaatttttaaattatgtaaaaaaaaaaaaaaccaggaatacattatgggactatgagctgtcagcaatgaagcaggagcaatgacgtcttttgatggcgttggcaggctcacagctagaaccagcgcaagagacaggatgtgctgtggttgtcagaagggagggttccacactcctgcaggctggttgagtggaaggcgtagggcttcaaatcagggcttctgggacccgcataggcttgggtgtagagcgaagaaaggccttgtgcacacagataagcactgaagaagccaggaaaggtaaacacacggcttgcctcttcgatggaatgaggtgtgcagatagatgctcttcctggaacgccaggaatgatggagttttataacctggcgatcccttgctgtctgatgagacaggctctgctcgtatctcccagacttcatttcttccagacaataccctcccccttcaaaccttgagtaatgacttttagaccacaaaacccatcctcatgtgggatgtcacctgtgctatcttagggccaggccaatgctgacacccacaggccttatgtttacctcggccattcttacctagaccctaaatctcgggcactgtctctgagtcaacagtacctattcctgtgaaagaagccagatgtgttttgtaaagaatctcagtgtaagcatggcttaaattattatatactcgggactgagttcattgttctctgaatactttttttttttaaattgtgctgtgcttaaatatggctaaagtaaaatgatctgggacagactctagaaatcctggttcatcacccgctacaatcaaatcagcctgaaccaggttttcctcttgcctcaccctgatcattttttccttgcctggtataaagcttgcaggggaatggccacacgtgagttatgtgggacaaatggaatgtttacctttcttggtaagatccccttcttttatggtttagcactcatgtgatgtggcacttgagttgaccaaaatgatatagagcaatcagaagactttgaaatacctctgtgtcagaagcttggcatgttcaagctgctgtgtatagcaccacaattccaaacccaccagttatgaaaactgttagtgttctgtctaagctcctctccacagttacctggcaacagctaggtaggcctgatccactataaaaggggcttcttgccctctcctctctctgttgctcctctcttactcttactctcttgatcttgctctgtcctcttgtcacttctcccccctccccctctccctccacatgctcatgaccagcctcctctctctctctctctctctctctctctctctctctctctctctctgcctttctctgactctactaccctcttttttttttgttttttgttttgttttatttttgttttgttttttgagacagggtttctctgtatacccttggctgtcctggaactcactttgtagaccaggttggcctcgaactcagaaatctgcctgcctctgcctcccatgtgctgggattaaaagtgtgcgccaccacgcccagcctctactaccctcttaactcccctgaccatgccccaaataaactctattttatactatactgtcctgtggctggtccctcagggggaagggatgcctcagcatgggccctcagaggcactgctttcccccatacctgactacatctccatagaacatatcccccctctccttatctttttataaacacatcaaaaacaaccccaggaagcctttgtctcatccgtaagagatagcaatcctcagtacaaaattcgatggaaaagaatgaacatgggctctcagactttttcccacgcctaccagcaattgatctgaaagcaattactgtaggcccacagcctgggtacagagccatgggacaaactcgggaagttccacactgaggtctgattacaactgagctctgaatcagcaattagattttcttgacccagcaaattttctcatccgccttggcgagcctgattaaaatacccatttcttcagaaacgaaaatcccaattcctataaaatgatatccttgacccggaggcacctgcttgtgtaggtccgataggctcagtgtctttcttcagtgggactccttcaagtactcaggacagggaagacgtgggaggggcctgagagcagaggtgacaaactctggtctccagcaagcaagcatgtgatgaaaggaggggaggaggcctgaggtgaccagacagggcttgggcaacctgccagctcaactctaactctccactggcaagaagacagacatggaggtgtttatggaatgtctgctagttattaaatgctagataaaaaattaccagattagccaactcacacactggggacctatttatagcttcatggctagaagtaaacaaaccgctaacagcgaggcccgaggcatggatcatttagggtagagacatatttgagaacaccaagaacacataatctcctgaatgtctcatcctctcgcatgcccacgtgctctgcggtattagaacgtctttgttgagtcaacatgatcatgagtattttggttttttgttttttaattatttttcttttatttacttttttttttttttttttttgatcatgagtattttgtaacagacatttaaccatataatcagaaatgtctcaggcctccttatctgacattctgacagtgaagtaactggcagagaaatgagatagctgggaaacctggtacctgttgtcctggggccagggtctctccagagaaacagagcctggagtgggggaggggaaagcagcagagggaaagagacaggtagattcattttaaagggtcagtgcccatgactgtggggagagtgaggctgacctttgtgcagtaggccagcaggtcgaaacagaggcagagtttccatatcacattctccaggcagggtttcttcatctctaggaatttgttctcaaggtctcacctgattagaaggaagctatattggcatataagctatgtagaatttagctgatacaacacattaattataactgtaaagcgcatggcaacatcaagactagcatttgataagattgtgggccctgtagcctatccaagtagatatgacaaatgaaccaagagatgagggagcagccatcttggccatgcacttggctgagagcatagagtaggccagcttgttggaactgccaaagcctttaaaaacagaagtaaagggcctggagagagctctgtggttaagagggtttgcagctcttgcagaggacctaagttcagttcccattgtctctctcactgctgcctgtaactcctgctccagggcatctgacaccctatgaagtgtttcattatagtatagctgtctggggtccatagggtgggtgttgggtaggggtcctaaagtagtgctggagagaaacttagagtggggaaatgggagggtgtatcatgaaaggctttgaaccctgctggtcccgatacatagattactattttttttaaaggtggtttctctctccagtctactttgagaggttatatgtatgttctagtcaatgatttatttatttttcctgtttgtggtctcttcttcccagatctggacctgcggtcttgggagttggaaggatctgatgggaaaccctcaagagacttctggactcaaagtgagaatcttgcaggacctgccatttgcacttttgaaccctttggacggtgacccagggctccgaagaggagcttgtaagactgacaatcttccctctgtctcaagactctctgaacagcaagaccccaatggcactttagacttacccctgggatcctggaccccagtgagggcctaaggctcctaatgactttcagggtgagaacaaaaggaattgctctccgccccacccccacctcctgctttccgcagggagacatggaaattcccagttactaaaatagattgtcaatagagttatttatagccctcatttcctccggggacttggaagcttcagacagggtttttcataaacaaagtcataactgatgtgttttacagcatcctagaatcctggcagcctctgaagttctaattaactggaagcatttaagcaacacgttaagtacccccactgtggtatttgtttctacttttctgtttttaaagtgtgagtcacaaggtaattgttgtaacctgtgatatcactgtttcttgtgtctcttctttcaactacatcttttaaaacaaaacggtgtggggtttggttgttttggtggtagtggtagtgtttctcagtggtatctccttaagaaaaaaaatcatcatgccagtgaattgtttcttcagccatttcagatgggaagctggaatagcctgtcccccaagctaagccttcttccctagctttctgcgtgattttacattgagcattcctgttgctttgtttctataactgtaatgtggtgatgtcattgttagggcacttgagggtgggcgttctggaagtcctttcaggttagtgtttgggggcagggttgctcagaatacataaaggtgctaacttaaactgcagccatggagctcagtgaattcactaaccttcgggctgtccaaatgtgcacattagctactgtgacccctgtaggttagggagcctgaagccagctctttacctggtgtttagactcagcagaatttggagtcaatgggaccaaatggttgtgaaattaagatttgaagtgtgcatcttattttatcaccatctgcccaacaaaacttcagaaaatgcctttgaagcacaaaaatgtaatcgtttatgtgaaatctctgagttgcatttagatgcccattgcagcaaggtggctctctcacagattccacaccttagcctaagataccagacagcaggacagagagaaaagtccttcctggtgtgcaaacttccttacactggacctcgcctctcaggtgtgtgattggtaggccaaatcccgatagccaatcggtgttgggtgctttgtctgctctactgggagtccagtggtacaatggattctggcaaaatgctgccatcttggccctcgctgggctgctttctaggatattcatagagaaagggccgtccagatccagtatcctaaaatcctgagaggagaatataagttagtgtgtctcactataactatctctatgatcggtcacattactatctaacagttaccaaatactatatgcctaatactggtaagcattttatacacaccattggattgaatcctctcaaaatcctcaaaaaggaagttattaatacctccataggcaaggagcccagaacccagagaggtcaggcagtctagttatagatgcctgctttgtttagaagtgaacaagagcatcaaattattaatgtgccctggttattaatgcgccctggttacctgctggatggaacatcaaggtggacttttggcagttgcatacacccagaggtattttggctattcacggattaatttcacacgaagtgtttcagagacatgtgtaggggaagtccgggttcagggggcctaagattcaaaatcaaaagaatgagcagtaaaagaatggtgtttactgcctgcctttatcaggcagtgaacgtgcagcgggcaacgaatgcttgataagtgtgtgtcagtgtgaagtcccatgtaccagccgctgtccccactgcaaaagcagcagagcgctcagacatcatcagctgatttaccagcagcagatttcttcttctagtcccatccctgaagaagcttccagcctaggtacattgcatgggctttgtgctccaggagttcctacacagccctcaacttcaacacaggcaaagtgcttactgatcctcatgtatcttacagggtcccctctacccacaatacctcattgctggaacttcaaatcttcctgaataaaagcttgcccgtggtttaattattacctatactaggagattttcctccagctgtctttcctttggacacagaaatgtgctcactttctctgtctctctgtctctgtctgaatctgtctgtctgtctgtttctgtctctctccctccctccctccatccctccctatctctcattcccatccaatgatgcttacatgttttcgtttttgaactctgaggactggagcacacgttatctccccgcttggactccttgaaagcagagagaaaagaggatcttcccatgcccagagcaccttgtgtgagataggtgctttgtgtgtgactgaccctgaaactttaaatattgaaaataacatgacgctcattagtctgactttttatgaccgtaatgtgattggctaaaaaagtaaataatgggaactttaaaaaatgtaattcaaatataatattatttctattcctcccttcccttcatctaaccccttccatggctccttcctccagtcctcctcatggctcccactcgctctcaaatcaatggcttctttttctttgactactactgtcactgacatgcacataaatatatgagcataacttgctgcctctgttaagtgtcgcttgtgttaatatgattttagagttgaccactttgcattaggaagtcaattagggggccatccccgggagaggataacattcctctttgtggtcttcagttgcctgcagtccttcacctcggactggtgacctttgtgactttcctcttccatattagcaagcctaattgctgttgtccttgatgggtctggttcaggcagtcatgtagttgaagaatcatgaacgtagcttcccagacatttctacaagacgtgatcccacagcagactttccggttctctggttctccgcactcttctacttccatgatgtcccttgagcgttaggtgcaggggctctattatatacatgtccgctgggtctgcacccagatggttagtttatctctgcatatgtaaaaggtaattttaaaaatttctttaacgtttaaatttttataagtatgggcatgtatatatatatatatatatatatatatatatatatatatatatatatatacatgtgtgtgtatgtgtatatgtatatgtagatgtagatgtagatgtagatgtagatgttcaaagaaagccagaaagaggctgatctattagaggtagacttacaggcagctgtgggaaacaggtcttgggtcctctggaagggcaggaagtgctcttaaccactgggccatctctctagccactataatggcatttttttttaaaaagtggattaattctttttagtgttttatatataagtgaagtaaaaataggatttagaagcgtttgaagatttgagaaagagcaatataggctgctctcattcaatcacaaatgtattgagttccattacttttatgtttgtctatttatgaaggtatactttattatatttcatgtaattttctatcctttgaaaaaatctgttatgaatcttaagctagcacatatgctgctggctagttgtaagatattcttcgggcaactgtgacagtgtttgcttaaaccttcctcagcttctggaagatggtagcctgtgacacacacacacacacacacacacacacacacacacacacacacacacacacacacagaacacagagcaaactccatatgaaagtcactgcccccgctacatctctttcactacttttagagtgaatgttaaccacatatttccttggaaattctcaagtgttccctaaggtcaattcttacatatacactggccggtgtgtatggatcttaacagtgttctcctgttcagttcatggggtcagccatggggcagatcagagggctagagaaggctgatctagacgttttctccaggctttccctccaagggccattgctgactgtcttgcccagagcccagagcccagagcccatgaccttctccatgcggcttactgtgctgctgggttccagtaactgctgcctcccttccccttttcaagattaggtgcctaggtcagtctgtctgtcttcttgtctgtctgtctcttactctctcagagagaaagatatagacaggcaacctgcctgccctgtggtacaatactatatccagcccacacatttacaaagactccctttaattaaaagttcacattttccagttccagaccttggctggtaggtcaagctatttcaaagaatgtaatttctttttcttaggtaaagagtgggtactctagttatgcactgctaggattgttctggaatctgtgcccatgcagactaccttcactaagaactcggaaaatacccctgaatttgtgctgttgttattgatattgttatcatgggtgtggcgagcacaagggtccacatagcgcaatgagatttgaagttctttgaaatgtacttcctgtttcaaggtattttgtgagcatgagctgttttatgaccttgtaaaaatagagaatccaggtggtgaggtgcagacagccagttaattgtatttgttttgtgactcaggagatcacctcactgccatcagaagggcacccatcctcttaacacatctgagagtgtttacagaatgagtctgaggcttagcaggtacaagtgcttgtcacacaagcccggtgacctgagttcaaacctcagaacccacagtggaaggagaagagaaaacccacctctgagagttgctctctgacctccacatctgtgtcatggtgtacacacaaacacatgcaaattacatataaaagttgctatcttgtgtcttagttgttgtgtctttattacttttagagtgaatgtgaaccaagtatttccttggaaattctagagcattccctaaggtcaagtcttacacattgatttctgattgattggcttggttagttttgttttgccatgtagtgcggttttgttatcttgacttcttcggggtggttacaggaacacaaatttgttgggaagttgagcgtctcaggcttcttaggtggaccacttactttctggcgtgctttgtattcacattgctactggatgctcttccaaccctggggatgcttaaggcttcactttgcctatgtaacaggttaaagcagtgatacttttacgttttcctgttttgatcacccctggctttgatcctaagcatcactcttcctgtgaccttggaatctgagtgtagtctatcctccccttccctgctcagcctctagctaagtgtttcatttactcaataatttaatcattttgatacattattttgttttaagctacagtgtcttcacctatctatggacttcctaacaataatacccctctcactgaactgtcctatgaagatgatgcatacctgatttaaaaaaagaaaaacctatccaacaaatacagaagtggatgctcacagccatccattggactgagcacagagtccccaatgaaggagctagaaaaaggacacaaggagctgaaggggtttgcagccccatagaagaaacaatatgaactaaccagaacccccagagctcccagggactaaaccaccaaccaaagggtaaacatggagggacccatggctctaggtgcatatgtagcagaggatggccttgtgggacatcaatgggaggagaggcccttggccttgtgaaggctcgatgtcccagtgtaggggaatgccatgacagggaagtgggagtgggtgggttagtgagcaggaggaggggtaataaggatagggggagtttcagaggggaaaccaggaaagaggataaaatttgcaatataaataaagaaaacatctaataaaaaaactgttcaagaaacatgcatttctttccttaataaatatgaattaagaatgaataaattatgtaaattttgaacaaatgattgtgtcaattttctttgaagtttatgttaagagttaactcataaattagtattttgatgatctagatagtccagtgctatcttatttgtggctttagattcttcactgtctttgattaaaatctttgaataattatactttgaaattatttttattagtcaagatatatctcagtaaaataaactctgacttacagcaaagttggaatagagggagaagctagattctcacttgtagtgagtcatatctggtttctagtctgtaattcaaggtaggcttttcaaatgacacagacattaattcatagagccattccccaccaggattcccgtgggttgacacattctgaatgctagatgatagctcgtcatttctattgaaatcagcaagtccaactccgtggtgatgtttcccaccacaccatgcttagagcctgttcacactgctctgaatcagctcactgactgaattctcagtacttcagagaagccactactccctgttcctcatggtgacccaaggggcaagacaagatacataattatacatgaccaggtggtgagtttgcatcacggaatatagcctactcttatgctcatattccaaccactcaaccaagaaagtaaaaccttttccaactgctaacatatttgtctcatagcttttgctgtcttacaagctaccccaaacgcagagatatctgcaaggtgcataataaacagacacagactactggcaggcaatttttcaagacttaaagttgctctcttctctgtctctctgtctgtctctctctacctgtctctctctgtctctctgtctctttgtctctctctctctgtctctctgtctctatctctgtctctctctgtctctatctctctgtgtttctctctttgtctctgtgtttctctctttgtctctgtgtctctctgtatctgtctgtctctgtctgtctgtctgtctctgtctgtctctctgtgtctctttgtctctttgtctctctctatctctgtctctccctatctctgtctctctctgtctctgtctccttctgtctctctctgtttctctgtctctgtgtctctctgtatctctctgtctctgtctctctgtgtctctctgtgtctgtctctctgtttctctctctgtctatctctctgtctctctgtgtctctctgtgtctctgtctctctgtttctctctctgtctatctctctgtctctgtctctgtctctctctctgtctctttctctctctgtctctttctctctctgtctctctgtgtctctctgtgtctctgtatctctctgtttctctctctgtctccatctcccactctctgctctctctctctctctctctctgcttgagactgcacacattctgcattctcctgcgcactctgcttttctcctgtgcacttttcttttctcgaactcgcacactcctacacacctctgtgcgttcccctttcactcacacacacacctcacacacatctcacacacaccacatgcactctcctttcactcacacacacattcttctcttcacactttcatattttctccattcacttcacactctgtccacacacacctcacattctctcttcactctcttcacatttgctctctctctctcacacacacacacacacttctcgtgcacctcactcccacttcactctctctccactctctctccactcgctctctcgcctttttcttgccccagtcttttactgatactccaaaagcagggagagaaaagacattgtattctcattgccaaatcaaattcaaaagaataaccacatcccacaaagaatcaagaattacagttgttccccaaagtttcaagcttacccctatttccaggcttgtggccaaaataataattgcaaagtcatcactatttaaactttaattttttttaacttatacttcagagctcagaggtccgaggtcagctacgtgtgttttcttgtgaagctctaatgataaatgacgtgggcaaagctggcaggcagtggccagaaagaatcaacccttaacccttaactcagcagttctgctagctttctgcttctgcacattgcacacaacgactctcctaagagtctcagtgttttgacttagttttactagtatagaattatatgcattctacaattgcttatccaggaaccactctcaaatgttgtgcaaaacttatttcataacttcaacagctttgccttccttgggtttccaatgttggctctaattcattttctaataatttcttcaaactttctttgcaagtcaagcattaatctggaactcccattgtgcagttgttacattgtttccaagatgagaacacacagcaggcacctgggtcattaggactgtgctgtgctgtgccccaagcctcaatttttaattgtgtaagaatcattgcatctaggaacatcgagtttcacagaattcaccagagcaggagaaaggagtaggaaagtcagatataatagaataattatgcagaccaaggccaaccgaaaagcagtcacgagcagatgaattctatacaactgttgtccaaggctaagattaggagaaatgggaacaactgttgtctacaaaagacagctgtgagctactgacatgtctccaccctggcctactgcaggcagtcccttatttcaggtggcaggtcccctggagggatgtaactactccttctcaggttcccaggcaccatcctttttcacaaggagctgccacaggcttctgagatgtctccatccctttctgcccctttccctctgaaagagacgggaatcctggagtttatgagaaatggagacacccctttcgaggccactgctcatatgtggttgtatcagagtttcaagcaaaagaaagttagtgtctgcagatgggaaggcgggacttccttcattatgaaggggagatcagggacagactcaggacaagtgtgctcaaacattcactcctagcctgagtccaacgccttccaagtttctgttctccgtgcatctgccagctgcggaatgcttggtttgcttctgaatccttagtaatatttagttattcctgcaaccagaaagaacacgatatattttgaacgcctgcttagaaccccctactggtgctctgcctacggttttaggggaaatctctgagcttgctgctttcttcctgcacacacactaatacagaagcagccacatcacctcgattcctttatgaccttatctttactagaacaatgctccaatataacagctactcggtttccaaaaattctacttctccatcaagcctccctcgggtctcaggaagctacgaggaagaggaggcaggaaaaccgtaaatcggtggggatggacgacaccaaggaaataagaccttctagataagagagcagaactgatgctcgtagaagctcacagacaccgtggcagcacgcacaggacctgcacagtcccagtactgagaggggaactggacacgaggcccatccctcaacgcagaaatgttctccaatgaacagccattcacagaagaaaaatcagttttctccagtggagtctcactgggtgtacacacaacacttaagggaggttccatgcccagcagcagacttgcaaacacaaagcaaactgcatggtagtttttggagatgttatctagcaatactttgtttggtctgtttttttgtttttgttttgtctttcctctttataccttgtcttttgcttttctattatgatctctgatttttttgtgtttttatgggttttgtgctctgtgtgtgtgtgtgtgtgtgtgtgtgtgtgtattcatgcaaatacatacaagctttttctctctcttttttttctgtttctttgcttttattctggattgttttattgtttattggcttattttaaaaggtctggggtcatctgggtgggcgtgagaagggtctgagaggagacgatggaagggaaactgtgatcagaatactgtaggaagaagtattttcaattaaaaacagttagaatggagctggcatggtggcgtatgtacgtgatccccgcacttaggaagccaaggcacaagaacctcgtgagttgggagccaccctgggctataaattgaaagccagtctcaaaccaaaagaggaaaatcatatgcaaagtggcttatgtacaaaagaaggactactcatttgtgtaaatgagcagcctagaggtgcaactggtcccatcagaaaacc

SEQ ID NO: 1620 - DNA, 744 bp, Mus musculus
atgctgctcctgctgccgatactgaacctgagcttacaacttcatcctgtagcagctttattcaccgtgacagcccctaaagaagtgtacaccgtagacgtcggcagcagtgtgagcctggagtgcgattttgaccgcagagaatgcactgaactggaagggataagagccagtttgcagaaggtagaaaatgatacgtctctgcaaagtgaaagagccaccctgctggaggagcagctgcccctgggaaaggctttgttccacatccctagtgtccaagtgagagattccgggcagtaccgttgcctggtcatctgcggggccgcctgggactacaagtacctgacggtgaaagtcaaagcttcttacatgaggatagacactaggatcctggaggttccaggtacaggggaggtgcagcttacctgccaggctagaggttatcccctagcagaagtgtcctggcaaaatgtcagtgttcctgccaacaccagccacatcaggacccccgaaggcctctaccaggtcaccagtgttctgcgcctcaagcctcagcctagcagaaacttcagctgcatgttctggaatgctcacatgaaggagctgacttcagccatcattgaccctctgagtcggatggaacccaaagtccccagaacgtggccacttcatgttttcatcccggcctgcaccatcgctttgatcttcctggccatagtgataatccagagaaagaggatctag

SEQ ID NO: 1621 - DNA, 744 bp, Mus musculus; identical to SEQ ID NO: 1620

SEQ ID NO: 1622 - DNA, 79684 bp, Homo sapiens
aatggagcctgtgggctgcgttgcgaacaatgccggcttcattaacataaaaacagcattcttcttggacatatacacatgtgccccaagacaagaatgttaatccaaactgcaccattttgtaagcgccctgctattttgcagaccttggtaaaagtgacacatttcatgggtttttgggccatgagaaacaccctgcctaaccacttgaccacaaggcccacaaaggcccaactaaagaaatatctctatcatatccttctgggcaaaggtccaaggaacaccacgatgacatcccgcctgaacaaggaccagaactgcctcatgacgggaacatcttatcaatatcctaccgggcagcaagccatactgcccagacccctcccgcccatacctataaattaccccagcctgtaagcagcggtaggcactggcgttaggctggtccccgacttctacagtgtgcatatttctttaaccctcgccttcccttcaaaacctaacagggatcagcctgggcaatatggcaaaatgccatctctgcaaaaaaatacgaaaattagctgggtgtggtggcgcatggctgtggttccagctacttgagaggctgaagtggtaggatcgcttgagccccgcaggttgaagttgcaggcagccctgattatgccactgcactccagcctgagtgacagagtcagaccctgtctcaaataaataaataaataaaaataaattagaaacacatacagccctttgttgatttctttaaatgttttcttcttgttatttttcagtaatctaactatactctccattattgcttttaaaaaattatttctgtctttacaaaagtaatttgtgctcatggcagactatttaaaaaacaaaatgaagccaaagaaagaaaataaaaattaactgcaggagaaggaggcaagagagctaactagatgcagccaggagaaacacctctcacagagatcttcccagattttcagagggaaggcatcaagagtggacagagggaagacacagaggctgggctgaagcaggaggaagctgaaaaccctgcatgaggctaccacacactgggacttgttcctggcccccaacaactcctgcagaagggatgagttgaacaggcaaggagaaacatgctcttgcaatgggtctctggaatcacgacaggaagagacccctcaaccactgtggacacttgagttggcaaggagagctgcttagagaagtggtaggggcagagctccaggtgatgtggagcccagtaggtttcgtgcgggagtgtttgtggtggagtacagccagcgatgtccatctccctaggctcaacttgcttccataggagactttagcaccaggggagctgtcggtcctaaattctgcagggcggtgttgcccatgagatagggccagtctgacttcagcaccctttggtctgctagcctttcccagggccccagcctgtccatgcctgcttgcagtgcagccaccaggtacctcctgggagcccacatcatagcacctgtgctggcagaccatgccagactgtcagagtgctgcagcagagtagcccccatggacacacaccagcccacccagctcatcccctaactacagcctcccccttgttgctttgcttgcacacacttgcccacagccacccttcatatcactttgccagtacctgcgtgtacaggcagacctcaccttcccttccccaccagcatacgtgtgagcgtgtgccctgccatgccactgctgctggtgtgagtatatcctgcccctcctttccctgcagcactgtccactgtgatggcaatggcattgtcatcagagtgttgttgggcatggagctgccagctccgccccagccagtccccagccctgcccctatgcgaacactgcctatggcacaaaactaggcacaaaaaccagcaggcccacccctgccctgagcggccaatgcctcccatgtgaatgtgcacagggggcacacacagccctgcatctagcagcatcctgctcccatgctaatcccaacactggcacaaacatgtgtacagttgctggtgagggccccccaacctgcctgagccatgctgccactgctgcttctatgaacacctgcacgaaggctggcactccggcatccactagcaccttgctgcagccaacaagtgtgcaccccactgcaccgctgctgccactgcgactggcacatgcgactgaggatggatcatgtttccacagccctacaaagcactttggctggcaccatgcctcagagagttgtgatcagaggtccaggagcacctcaggcccctccaacatagcaggttcctaaccttaaggagccagagaacaagaccggggcctgataccagtgccccagagttataacacacagtttgggagtcctgagctgagacttgggcccctaaaatcttccagaaatgaagccagtctactgaacccaccttataccacaatcaaaccccgaaggtcattaaatatgatataaaaagggggaaaaaaaaacaaaaacagcaacatcaaagattgaaggaacatcattctacaaagatgagaaagaaccaagataagaactctaacaactaaaaagccagatggtcttctttcctccaaacaatcacactagttctccaataatggttcttaaccaggctgagatagctgaaatgacagaagtagaattcagaatattgataagaacaaagatcatcgcaattcaggagaacactgaaacccaatttaaggaagctaagaatcacaataaaacaatacaggaggtgacagacaaaatagccagtatagaaaagaatgtaactaaactgatagagctgaaaaatatactacaagaatttcataatgcaattgcaagtattaatagcagaatagaacaagctgaggaaagaatctcagagcttgaagactgactttctgaattaagacagacaaggagacagtcagacaagaacagagaaaaaagaataaaaaggaacaaacaaaacctttaagaaaaatgagattatgtaaacagaccaaatctatgacttattggtgtccttgaaagagatggggagaatgggagcaacctggaaaacatattccagcatatcattcatgagaacttcccaacctagctagagaggccaacattcaaattcaggaaatgcagagaacccccacaagatacttcacaagactgtccccaagacacataattatcagattctccaagatggaaatgaaagaaaaaaatgctaaaggcagctacatagaaaggaaaggccatctacaaagggaagcccatcagactaatagtagacctctcagcagaaatcctacgagccagaagagattggaggcctatattcaacattattaaagaaaagaaattccaaccaagaatttcatatccagccaaactaagattcataagtgaagaaataagatatttttcagacaactcaacgctgaggtaatacattaccaccaggcctgcctaacaagagttcctgaaagaagcactaaatataataaggaaagacagttaccagcctctacaaaaatgcagttaagtatatagaccagtgacagtataaagaaaccacacaaacaatgcacagaatggcaagctggataaagaagcaagacccaatggcatactgtcttcaagggactcatatcacatgcagtaacacacataggctcaaaataaagggatgggaaaaaatttaccaagaaaatagaaaacagaaaaaagcaggggttgcaatcctaatttcagacaaaacagactttaaaccaacaaagaccaaaaaagaagaagaagggcattacataatgataaagagttcaacaagaagatataactatcctaaatatatatgcacccaacacaggagcactcagattcataaagcaagttcttagagaccttcaaagagactcagactcccatacaacaatagggggagacttcaacaccccactgacaatattagacagatcatcaagtcagaaaattaaaaaagatattcaggacctgaacttaacactggaccaaatggacctcatagacgtctacagaactctccacccaaaaacaacagaatatacattcttctcactgcctgccacatggcacatactcccaaatcaacgacaccatcagacataaaacaatcatcagcaaatgcaaaagaccaaaatcataccaaccactctgtagaaccacagtgaaataaaaatagaaatcaagactaaaaaaaaaattgctcagaaccattcaattacatggaaattaaacaatctgctcctgcatgacatttgggtaaataatgaaataaaggcagaaatcattaagtttttttaaaccaatgaaaacaaagacacaacataccagaatctccaggacacagctaaggcagcgttacaagggaaatttatagcactaggtgcccacatcaaaaagttagaaaggtctcaaattaacaacctaacaccacaacaaaaagaactagagaagtaagagcaaaccaaccccaaagctagcagaagacgagaaataaccaaaatcagagctgaaatgcaggagaatgagacatgaaaaaccattcacaagatcaatgaatccaggagctggttttctgaaaaaataaataagatagatagactgctagctagactaataaagaagaaaagagagaaaatccaaataaacacaatcagaaacaacaaagggaatattaccactcaccccgtagaaatacaaataaccatcggagactactatgaacacctctatgcacacaaactagaaaatctagaagaaatttataaatgcttggacacatacacccccaagactaaaccaggaagaaactgaatccctgcacagatgaataatgagctccattactgaatcagtaataaatagcctaccaacccccacccccaaaaaaatgcccaggacctgatggattcacagtcaaattctaccagatgtacaaagaagagctgacaccattcctagataaattattccaaaaaaattgaggagaaggggctcctccccaggtcattctatgaggccagcataatcctgatactaaaacctggaagagacacaataacatcaacaaaaaacttcaggccaatatccttgatggacattgatgcaagaatccttaacaaaatactaacacactgaatgcagcagcacatcaaaaagcaaatccaccatgatctagtaggctttatacccaggaggcaaggttggttcaacatactcaaatcaataaatgtgattaattacatagacaggactaaagacaaaaaccacatgattatctcaatagatgtagaaaggttttttataaaattcaacatttctttatgttaaaaatgctcaacaaactaggtattgaaagaacatgcctcaaaataagagccaactatgacgaactcacagccaacatcatactgaataggcaaaggctggaagcattccccttgaaaaccagcacaagacaaaaatgccctctctcaccactcctattcaacatagtattggaagtcctggccagagcactcaggcaagagaaagaaagaaaaggcatccaaataggaagaagggaagttaaacaatccctgtttgcagatgacatgattctatatctagaaaacccctagtctcagcccaaatgctccttaagctgataaacaacttcagcaaagtttcaggatacaaaataaatgtacaaaaatcactagcattcctatacaccagcaacagcgaagccgagagccaaatcaggaacacaattgcacttgcaatttccacaaaaaaaaaaaaaatacctacgaatacagctaaacagggaggtgaaagagctctacaatgagaattacaaaatactgctagaagaaattagagattacacaaacaaatgggaaaacattccatgctcatggataggaagaatcaatatcattaaaacgaccaaagcggtttatagattcaatgctgtttccaccaaactaccagtgatattcttcactgaactagaaaaaaatattttaaaatttatatggaaccaacaaagagcccaaatagccaaggcaatcaaagcaaaaagaacaaagccagaggcatcatcctaccagacttcaaactatactacaagggtacagtaaccaaaacaccatggttctggtacaaaaacagacacatagaccaatggaacagaatagagaacccagaaataaggctgcacacctacaattatctgatctttgacaaagctgacaaaaacaagcaatggagaaaggacttcctactcaataaatggggctgggataactggctagccatatacagaagatggaaactagactccttccttacaccagatacagaaatcaacttaagatggattaacaacttaaatgtaaaacctaaaactataaaaaaccctggaagacaatataggcaataccattctggacatagaagtgagtgaagatttcatgacaaagacaccaaaagcaattgcaacaaaagcaaaaattgacaaatgggatctaattaaactaaagagcttctacacagcaacagaaactatcaacaaagtaaacacacaacctacagaatgggagaaaagttttgcaaactatgcatctgacaaaggtctaatatccagtatctataaggaacttaaacaaatttacaagaagaaaacaaacaacccaattaaaaagtgggcaaaggacatgaacaggcgtttttcaaaagaagacatacacatggccaacaagcatataaaaaagctcaatattacttatcattaaagaaatgcaaatccaaatcacaatgagagatcctctcacaccagtcagaatggctattattaaaaagttaataagttggccgggtgcggtggctcacacctgtaatcccagcactttggaaggctgaggcaggtagatcacaaggtcaggagatccagaccatccaggctaacatggtgaaaccccgtctctgctaaaaatacaaaaaaattagccgggcgtggtggcgggcgcctgtagtcccagctactcaggaggctgaggcaggagaatggcatgaacccaggaggtggagcttgcagtgagctgagatctcaccactgtactccagcctggaagacagagtgagactccatctcaaaaaaaaaaagttaataaacaacacgctgacaaggttatggagaaaagggaatgcttatacactattggtggagtgtaaattagttcaaccattatggaaagcagtgtggcaattcctcaaagagctaaaaacagaactaccattcaatccagcaatcccattactgggtatatacccaaagaaatgtaaatcattctatcacaaagacacatgcacacacatgttcatcatagcactattcacaatagcaaagacatggaatcaacctaaatgcccatcaacgacagactggataaagaaaatgtggtacatatacaccaaggaatactatagagccgtaaaaaagagcatgtcctttgcgggaacatggatggagctggaagtcattatgcttagcaaattaatgcaggaacagaaaaccaaataccacatgtgttcacatataagtgggagctaagtgataagaacacatggacacaaagaggggaacaacacaaactggagcctagctgagggtggaggccccagggaggagggagatgagcaaaaaaaaaaaaaaaaaaaaaaaaaaaaaaaaaaaatgactgggttctaggcttagtatctaggggacaaaataatctgtatgacaaacctccatgacacgagtttacctatgtaaaataaaagtttaacaaaaaactaaaaaagttacctatgtaaaacaaaagtttaacaaaaaactaaaaaaagttacctccacccagaaatgcctttattaacactttggtttgtaaccctccattattttctctagacatatagatttatgaggcaggctaatgtgctgagacactagcttgagtttcatttggccttgctgtgaatatacctgggccttcctttgcttcaggatgccctaaactgtggcaaagcagagctgaactgcccaaaggaaagtgtgaagaggagaggcaggccaagcctggagaaaggctacccaagagagaggaaaggaaactgtggtgagtgcacctcactcctaaagaaggacaggaactctggtaggtgaggtgtgttttccatagatactaaaactcaaagccacacaggggacatatgtccattcctcagccagtcactgtggccaggaacagagggtcaggtaagagaatggcaactcctaaggaaaccacatgcctggagccgtgggtgtagaagcagatccccagaggaagcacgggtcccacagacacagtcccaactcttgccgtctaggcagccactcccatctgtaggtactacacagcttcgtagtacttcttaaagtacttcttgttcaagcgatgggacgaaaagaggatgcaggacaaggaggaggaaaggagatccttgcttttgtagaagaaacaaggaggcagggaaggcttagaggacaggcaaggagagatgttttcttaaaaacatcctctgtctgagtgttcagccccacatctctgctggtcctacccctataagcacaaggaaaagggcgggaggcagcaggagaaggattgatcattcaggcctatattcaagtttgccttttcttgccatgtggttttaatctcaccaatcacaagcctgaaggtatagtggggccactgaggtccgagttcaaattcagccatgcaactaaggaaacattgtttgatcttggtcctgttttctcatgtgtaaaatgggtctaactctaaaccacacattgcactgagaatgaaatgaggcactatgaaatgaagtgaggttagttgaataatgttccccccaaattcatgtctactgaggacctcagaatgtgactatatttggaagtagggtctacgcagatgtagtctaaatgaggtcatactgcattagggtgggcactaatcaaacggatggtatcctcataagaggagaggaatgtagagatacacacagaaaagaatgtcatttgaagatggaggcagagattggagtgatacaactataagtcagggaatgccaaggacttgaggtcatgtgttacagaagccctaggaaatgagtcaatttcctggcacagcactaagacatgctggtattcttcattccatccctttcccctattcctaaatgtgctccagggacaatggggaagctggagcacatataagaataggggaaagagagggaataaaagggtattaaaaactctcaaggtatgttaaaaaaaagactctcaacaaaccaggtattgaaggaacatacctcaaaataataagagccatctatgatgaacccacagccaacatcacactgaataggcaaaagctggaaggatgccccttgaaaaccggcacaagacaaggctgccttctctcaccactcctattcaccatactattggaagtcctggccagagcaatcaggcaagagaaagaaagaaaaggcatccaagaaggaagagaggaagtcaaactacccatgtttgcagatgacataattttatatctagaaaatcccacagtctcagcccaaaagctccttaagctgataaacttcagaaagtttcaggatcccacatgaacatacaaaaatcactagtattcctaaacaccaaccatagctaagccaagagccaaatcaggaatgcaatcccattcacagacaaactgctaaaagcaaaaccaaaactttccaaataagccaggctttcgtcagttcctcagaactagttctggtttgactcactctcatgttacggcaaaccttaagctgaatgaacaacttttcttctcttgaatatatcttaacgccaaattttgagtgcttttttgttacccatcctcatatgtcccagctagaaagaatcctgggttggagctactgcatgttgattgttttgtttttccttttggctgttcattttggtggctactataaggaaatctaacacaaacagcaactgttttttgttgtttacttttgcatctttacttgtggagctgtggcaagtcctcatgtgagtaacgagtgggttgagatactctcatactattatgttgtggaccatgatgaggctgccagggtgggggaagggtggcctaccttctctccacaccatttgaggcaagagacattctgcctcagaaattgtgctgaggggcacaaataagctaatgtcctcctgccccagatttctctcacttgttcctatgcatattgttcttgttgctcagttttataaggtgagatattttctgcaccaaatatgtgcactgtaaaataatataactattcttaagattgtctctcagcttagagttttcggaggcttaatggtgaagaacttaaaaatctgttttcctatgactgacatctgtttgtgattatccatttagcagacggtgatccctccaggctggcctttgtttacaagctatgcctaagaggcagctgttggtggagggggaacaaaaacaaaaaacccaaaactattatcttaataacttatagaggtaatcattattgaacaaaagcatgatttggggactatggaaaggcttattctttccatataaaatgatcagcgaaaaggtagaaaaattaaacagaactgaaataattgctattgattgctcaccgcctggatgcactgagtagaagagcaaaggcaatgggttcatgtggaggggatggaggtggagaggctaagcctgagtgagattaccaactaatcaggacttttaacccaaaaatactatggctctgaggggcagggaatgagagacctaaattgacaaaatgcagagtaaaaatattcagtgtgagcagtaatgagacagttgtatcagggtcaaatacggagttggcctggatgtcctccaagctcctttccaagcctaagattctgtgagtggatgaacaatcctggtcctgctgctcttgccactggaacctgatctatttgccttcattatttgaggtctccccatcatcaggctctttgttgtctgctgcttcagggtgtcttctccccagatttctcctgttggtgagcttttccattgaactggagctcctcacaggcaagaagcacacctttaaggttctctgagtcccaagttcctagtgcagtacctggcaatacacataggtgcttagtgggtgcttgccgaattgttgaatggatttatttgatgaaatgtcaggagaatcaccagaaatgaaatgttcgtgtaatggacagggggaagtttgaggttgatttgaaaaaggagatggtagagacagtattatgggtcatgcttcagagtttatttgctttacaatacattggacagcaaccagtagattgttgtgtgtcattttaattccacatgctaatgtccaaatatgtcatatgtcttaattgttgcatacgtgggttactctgtaaaggggcaactgtagtatcacctcctcatgccacaccctgctccactgtagctgggctcgataaccttcaaatcaactcacagaattccaggacagacaagagcatctgaaaggttatctagccccagtcacctctgatgccttccagctgtctctaacacacctgtgggctgacttccagttcttagtcttcacggctccctatgatgaactgcccctgctttgagggattttcctccattgcctcagaagtactgccctgggggagcttctgatgctcttctgaccaccttgtctctgcctttttcactagtcctctgttcctgctctccaaattttgggacgttcctgagttcagatcttttctttataatctttcttttatattctccccatcagatggttcattcattcctcaatattaactaacatttccatattagaaataacttccttatctttagccctaaattttgtcccaaactctggacctacaattttttggaatgcttatgccttgcccagactaaaaccaaacttactgtcttccctctaaaatcagctccccatcttctatttctccctgccacccttcctcccccatggctccaatattgtcttgccagtctggtcttaaaaccacagtcaatcttgttgcttttctctttgtctcttgtgcatggctgatcagcagtcaattgttttgtcaattgtcttatatgtttcttcttcctcttccttgcttcctttttctgacctgaagttagggccttgttaccaaacatctagatgaatacagtgaccccctaattgagaggctgtctaccaattccacccaccctcaattctatactcaaaaaaaaaattagatgtaatctttttcagatactcctttggtattgtcacttagtttttgagtgactgccactatttcccgattggcagctctgcctggcattaagctcttgacattctcaacctaagtgtccagccaagttactctgttcattgtcccctcaacacgcctgtgcatttgcacctctgagactgcttctgagtcagctatgcactgccctttagaatagcttcaaccccaaatcctaccagtgcttcaaaggcccagttcaaatcctacccctctgggaagtctcccttcctttagtcaacttctagggcttttgcaattttatcacttgttttacatcagttttactatttttcatgtgtgagagttttaaccttccaattatggtacaatgtctttaagggcaagggccctttcttagaggaaaccctctatgaattctccaatgataaattattctatgaattctcacaactttctaatataaaggcttataaaaagtgggaactcactgtttattgcttaaaaaattgagatttaatttgaacttaaatgctctattaaattgagtagaatagcatcttaaggctactggtagtctatctatgccacagatggtttagagatcaaataattactcatatacctatgacagcagagtactggctgtaagatccccccaaaactcaaatacctattgggtttgtcaggcaacaaaaataagtgaatccagctaggtctaatacaatggaaaatggtaggacctggggcaaactctgcataacttgcccaaaggcattcaaattcagattatgttcagacattgctaattacaattagtgtcttagacacttggcttcaaaacagtggttagttcaggtatttcagatcaattgggtatgcatttatctaggtcttcatggatagccgggctctactagacactgggagagggaagaggcaaatgggataagactggcagtatttaacaaagaatgaagtattttacaaacatgatcctttaggctggttattgttacacaaaggaatgatttgctaggattcttgagatacttccatagaatgtctatgcctcacttattgcacagaccagagaattccataaaagcactggctgtgtcttatttacccttgtatactagagcttggcacatagtaaataccaagtaaatgttttgaataaaagaaagagataattaaagcttcagcaccacaattatttgtatttcatctatcagtttggaaatagatctccacagacagtagaaatggcaagaaactaggcctatagcaaccaagaagtgaaactgctagaacctaccatcatttctgatcctcttgcaaattttgcttgaaaaaaatttcctcattttctgtttacgaacttatcctcagaatttacagatgtttccttgatttctctggaaagatacaacttcctaatgcaattgagtaaattgatacttcttatgtagaaataagcagaataagctgggcaaggtagcccacaactatagtcccagctacttgggaggctggggcaggaggatcacttgaagccagagtttgcttgaggccaggaattcgaggctgcagtgctctatgatcacacctgtgaatagccactacactccaggctaggcaatgagtgagacctagtctctaaagaaaaaaaaaaaaaaaaaaaaaagacaaaataagatcaaaattgagtatgaactgataaatacaaggtagacaagaaatatcctgagaggcgcaatcgttctgcagacatttgcttgggaagctcaggggaggatttatgaaggaggtagccctgagtgagtcttaaaaaatgggtagacttttaccaggcaagatcttagtgaagttagtgagaggagtggtcatataggaattcatgggatttttagaccaaagattaccaccctcataagtgataatgacgatgaatgtgaagaatgtttaccacttgcaaagtatttttcacataccttgtccaagttcccacaagcatttctgttcactacctgtggtttggtcaagagacccagatattagagaacgtgttgatttctagtttctaactccgcccaataacattaagatgaaaatggatagccacataggaacagacatcaataaacatatttagaaaacacaagtgaattttaaaaggggagacttaagaggtggcatggttgtttgaacatgttcgtttttgtctcctggagaaaagtcagcacaatgctcattcagctacataagtgtttctgttacagctctttcagtccaccattcggcaggtcctgaattcttgtcccttgtccagaaaaaatgaggtatgtggacaactggagggtgagcaaggcggagaggagcttcgttgagtgacagaacagctttcaggagacccaaagtgggtagcacttttccataggcaggaaatgagtgttcaactctcagcagagaggagacccacaatggatagctccttaccacaggcaggtcatcccagagaggtgaggagacacaagccaggcacagtggctcacgcctgtaatcccagcactttgggaggccgaggcgggtggatcacgaggtcagagttcgagaccagcttggccaagatggtgaaactccatctctactaaaaatatgaaaaattagccaggtgcagttgtgcacgcctgttgtcccagttactcaggaggctgaggcaggagaatcacttgaacccgggaggcggaggatgcagtgagccaagatcacaccactgcactccagcctgggtgagagagcaagactccatctcaaaaaaaaaaaaaaaaaaaaaaaaaaagaaaagaaagaaagaaagaggagatctgaagtgagcaactgcttcccctagctggtagtcccaatgtctgttcaagtctggctgagtccagggttttgtgtttgtttgttttgtttttttgagacggagtctcactctgtcaccagggctggagtgcagtggcgcaatctcggctcactgcaacctctgcctcccgggttcaagcgattctcctgcttcagcctcccgagtagctggtattacagacacccaccactacatccagctaattttttgtatttttagtagagacggggtttcgccatgttggccaggctggtctcaaactcctgacctcgtgattttcctgcctcggcctcccaagtgctgggattacaggcatgagccactgagcccggtcgagtccagggtttttacaggctcagaagggaggaagagtgtgctgattggcccatgggcagccatggaagggcccagaaaaagcactgtaagttcttaccccaggctgtggactccacccacaattggcaacctggctcccaggctttgggccatccctggcttgaaggttgggtttcaccagggacctaacccctttccgccaaggaacctgtctccctcttgccatcaacatgctgtccatgatgcccaggctgttcgtgccgaggggtgcctgcaggcctgccctgagccaccctcagcccctgctcagcctccctctgtgcttgtcagcacccaacatctggaagaggtcgaggcagcagggggctagtgtgtcagtaccatcctgagcacccacatgcctggccgggttgtgacagcacctaggcttggccacaactttgcttcacccagtagcaggtgccaggagtgggaagaggccagggagtgggagcaggcactttcaaccttgtgggagcaggggacttcctgggcccctgagagtacagagatgcctgggtccagagccactgctgggcagctacaggggtgcctgggagcatgcggttcccaccccgccaactcagtacggggcgggactcccacctgttcttggcctccctggccacacctccactgctgcagctgctctaaacgggcagctgctgccatcactgtgagctatgattgtgccactgactccagcctgggcaacagaaagagacctatatggtatgttaaatggtaatgactgctttgggggagaaaagatgactaaggattgttgggaatgctggggtagggttggagtgctcttgcaattttacataagacagtctcaggagaaaaaacaatgaaagtgtccgggtagagggacatgtacactggcagcaaggtcttcccttagggattggatctgcggaagaggccacacaggcctggaagcaggcttaaggccattcaggctaggaattccagtgtttcaaagacagactgcaatggatggcggttggtaggtcaaaagctccagataacatctctcagccctgcgaacaccttactctcggggagaaggatgggcacagtgggtcctttaaagcatggggtccaggacaggggcctcttgtcttggctgttgaaaaaactgggttttacactgagtgaaatgctgagccatcggaaggttttaagcaaatatggtttgacttttattttttaaaaaccactctggctgcagaatcaactgcaggaaggcaaaactggaatcatagcatccagttgtcagactaatgcagaaatcaccatgagaaatgacaatgactctgaccgatatggaagcagtggaggtggtgagaaatggtcagattctggatatatttgaaggaagggccaatagggttggttaatgaatcagatgtagagtgagaaaagaaaggactcaagatgactccaaggttcttgtccttcacctcaataagtggaggatggagcagaggaaggcaagactagaaggtaaaaatagcagtgagaaggctctgctatggtataagaagaaatgataagaagctgaattaaggtgatggcagtggggtggaagaaaggagagccaccatgcaaaaagtatccaggagggagaattaacaggactaggggatgggccatatttgcaagatgagaaatgcagaggtctaagattctagcttaaggtgggtgttgctactattagcataataggaaaacaaggcacaaagacttttcaaaatttgtccaaggtgttagaggcttacaatttgtaaaaccaggattaaacccagatgtgtctgattttagagcctgagctcttactcattgcataaaccatattttccccagaggaggattagtaggaaaggaagctgctggttggaaagtatctttatagcagtgtctgttcctcggtttgctcaaggggacagtgtgccaggaaagtccccgtggaagggcaaggaagaaggggaagttaaagccagtggcaggtgatccaagaatcttttctgttgctagagctatgttacatgctgtcctttcatgctctaaaaataagagtgctggcaagtgccaggcctgttggtgcagcttaagatgatacctttcttggatatatatgcatctgaataaggaaggctatcttctggtcaagctaaggtatgccatgagcatttccctgtggaaagcacttaattctgttcccagttgttacctgctgtaagatctccctttctaaaataaaaacaagaatacagctcactgaggaccttacatttccctctagctactgactcatttctcttctcctttttatagcactcttcttgagagagttgcctatatttgttgccacatctttacccattctcttttgaacctattcaagctttcatctgtacaaaactcactgatactgtgcttgtcaggatcatccatgacctccatactgctaaatgcaactctcaagagtatttggctctactgatcactcctttgtagcactgtgttttaaaatataggttttattattatttaggtatggtgaggccaatatatcaggaaatgactgtcgttgaaaaaagtatgttgtactcacagatcccaagagaaggggggcacaccatgccacaaagggccacatggggaagcaccagggtcagccaggaggtgggtggggggtgcgcaagatctttattgtggtttcaacaggaagaaatgggtgaagcagggtgagtggatttaggattagctgatataaataatttcagcaggctctggggcataggggctgtccctagtcttctggtacttggccctggggtgattaaggcagttgcatagtgttgggaatgtgaaagcccccaataaatgaggcagttgtgggtatgggctctgaaatgggttggtttgcatttgaaaggtgtgctcatgggcaagtggtttactctctcttagaggttagaattggctaaccctgggagcggcagtcccttcagggtcagcaaggccccaggtgtcaaagcatcagaatacagaaaataaaatgcatggataatacacactgccatttgcctttgtacccttcctttcaatcttctctgctggtgaccgctcttcacaaagatctataaatgttggaataccccatgtctcagtccttgggcactctctttcctatctctctgtaggtgatgtaatgcagatatccatgactttaaatctttaacacttctgcattgatgactcctaaatttacatctctaccccaactgcctactaaacacctccacttggctatctaataggcatttcaaaccaaatctacaacaaacgtaactctttttccccttccttaatttgcttctcccccagccttctccattttaataaacagcatctccattgccttagtgactcaagccccaaacttaggaattttcccagatttccctctttttctcaaactatatatctagcctgtcagcagttcccttcaggtcttttttcaaactatagaaggcctaaacaaaggaaagacatgctgtattcatgaattggaagactaaatattattcagctggctgtattccccaaattgatctatggattcaatgcaatccctaccaaaattccagcttcctttgtctgcagaaatgagcaagttgaccctaaaattcatttgaaaatgtaaggaagcccgaatagccccctaaaaaaaaatcttgaaaaagactaacaaagttggaggactcacactttccagtttcaaaacttactacaaagctacagtaatcaacgctgtgtggtactgacataggatagacatatagttcaataaaacagaatcgagagtccagaaatacatccttatatatatgatcaattgatgttttgcaagggtgccaagacagttcaatagggaaagaataatttcctcaacaaattgtacaggcacaactgaatgcccacaatcagtagaacaaatttggaactaaagttcttatatttaggttcttgatccattttgtttaatttttgtatatggtatgaggtaaggctccaaatttgttcttttgcatgtggacatccagttgtccctgtacaattgctccatttatatttatcttagcagaaaatacagatgtaaatctttgtgaccttgactaggcaatggtttcttaggtattacacctaaagcacaaacaataaaagaaaaaagtagataaattggatttttttacttaaaatcaatttgtgtttcaaaattaaataaaatcaaaattaaattaaaacatttatccttcacaggattctataaagaaactgaaaagacaatgtgcagaatgggaaaaaatatttccaaatcatatatttgataaatagtttggcaattcctcaaaaagttaaatatagagttaccatttaattcagcaattctactcctacatatgtacccaagataattaaaagtatacatagacaaagacttgtatatgagttttcataggaactttattcataatagccaacaagcagaaacaatccaaatgaccatcaactgatgaatgggtaagcaaaatgtggtatatcatacaatggaatattatttagtcacaaaaaggaacgcagtgctgatatatgctacaatacagatgaaccttgacaacattatgttcggtgaaaaaagccagccacaaaagtccacatattgcttgattccatttttatgaaatatccagaataagcaattgatagagacagaaactagattagtggttgccaagggccatagggaaagggaaggggaaataggaagtttctgctaatgggtaaggggttccttttcagggtaatgaaaatgttctaaaattggataatagtgtttgttgcacaactccgtgaacatactaaaaaccacagagtcgtgcacttaaaaaaagtttgtgttttaaatatatatacacacttagacacatataaccctctttcgtatatcaattatactttaataaagctgttgaaatttttaaaataaaattttaaaacaaagaaaaaatatataaactcgccaacagaccacttctcacccctactagcccctctactctaagctatcagcatttctgcaaacacattcctaaccgatctcactgcttgtaatcttgccagcaacctctccctctcagcaatagtctattgcctacaccaaagcttagttgtctcttaatgatgtaaatgaggttctatcattctcctgacccaaaccctccactgcttttcatcacactcagagcagctctgctgttgcctgatttagatgtatggctccaacagatttcccctgaagaaatgattccatggctgataaaagttggaaagcctcctcagtttcagaccattatcagattagctgtgtgctctgtccctttcctcaaccataagaagtccatggataaagaaagcttcagagtaaaggagaaagcatgggaggtacagcaggaccaaggtggggcattcgcagcccccaccctcatcagagccagttccctactctccctgtctaaacctcttagtaagaggtagttcaagagaggggcaaactcaattccagcactcaaaagcacttgactactttgctcagtcaactagcaagtatttattgagaatgtagctctgttctatggagtcttattttcaagtgtcagactcccagacatccagtccaggtaaagaagatggtgtccattattcatttgacaaacaaagttggggttcaagggccagctattgaaaaaagctatggaaagcttcatgagacgtgcaggtaactgccaatatgtgtggttcacaaggactggttcatattcagaaacggccattagaaaaggaagaagaacttctcatttggatttataaagagtgtcttgtttactcttaatttatatcttctcttctccaggaaatcaacctataacttctcctcccagctccactctaccatggtctgtcaccttccccaaatgatttgttattcccctgttttcaaaagtgaacaaagaaccaaagacccagcaaagtttcacaaggccctgagactttcaattgtctatttcagatcaaatacagaacatgatcttcctcctgctaatgttgagcctggaattgcagcttcaccagatagcaggtaagaaaggacaaagggagaggcttaagaaagaagagcaggtggtggttcctagccaaagccaaaaatgagaatgtggccctcaggctgagggctttctttgagaggacgtatgatttctgggctattccaagcaccacaaaaaaaaaaagagtccccatggtggcttatacatgccaatgtccctatctgacagaaacggtgactgagaatattgctccatctattcccactatccagtgagggtaatgacaagaagacaggatcactcagaccatgtaaatctaaactgatacaagagggcaggggttgagttcccttaaaggtgagatgccaagcagctgtccccttcctttctggcagggagagtaaggagacaatggccagggaacaccgttactctaaagataatgtcttgaagacattctgcatattattagttgtttctgtgagtttcttttttgaaaagcaacaatagcagccgttggtcattcataccttaatgtggtttactgagtcttcctaaaacccaaatgaacaatgaaccttaaggctatccctttggacttgaagaaaggacttctattggaggatgagggtgagcagaaagaaaagcagtttcacagttggttgttctcctggggaaggtagttcagaccattcgagggtgtagttagaaccatgagtgcactattttggatgaacaccaggagctaagagagtaacatagaggtgtggacagaggattaagtcctcaagacaatagccccagccccatgggaaatcatctttctgctcatgattgagaaataatggctcccttggcacttgataacctttcgaagagctttctcctccctactagctggttccagatcactcttcacccagtcacattcctctcactcacttgagctgcccagcctggtctggcactagagacatgcacttggggccctcctcaaaggaagaccctgagatattctgcttacttctactctgctcctgcctgcagggccagctaaaggaacttttcatgttttctttgcaaggaaccctgcctggctggcattttagagacaagcaaaaggggcaataacttccttgctacaaaacagcttcaagtttccatagagtgataagggaaatgagggccaaaagacactgttccccatcctgtggcaggactgggggcttcaggagaaaacttggggaatgtgtaacctctgtgggtttgtagcttaaaaacactgagatcctgggttttctgtctttgttttttgccttttctcttaggaaaggagtgagctagggtgacaaggggcaacattttttatccctcattggctctttctacagaggaaggatcttttcttctaagataatcagcacaagacaatgaagataggcactagctcccagttaggtatactaatggggcaaaaggaagagcatttacatttattgaagattcactaaatgccagatactgtgctaggcaatttacatatggtatagttcatttaatcttcacaatgatcattttgcaggtgagggaactagaactcagaaaaggtacttaatttccccaagattacatagttattaggtgacaccggcaagatttcaacaaagctaatgtcctttctactttactgtgctaccatgatgatggtaatcaaaaatggcagacaacccataaatcttccaactttggaataggtttttgcactgaagtctgaatatggatacgtattgaatgtttattctggatattcacagaatcaaaaaatatgtgtaatgaattatgttgctgaattaactgaaaggaaagtaaaaatgtagcgctttctcattttcttcacgaatttggaattcttttctgctttccactatgcagataacatcagttcagacaaatattaaatacctacctaaattagaatgccttctcctcatgggatttttttaaaatcttgtcatttcatgtctctttaattaaagagttttgatttcagaggagggtacctgcaaaagaaaacaacaaaaaaactaaaggatctgagaaataattagtgtttacttctggggaggggaggaggtctgggatgggggtaaaaaggatagtcttatctattatgtatattcaggtttttgttttttacaagaagcatgtattaggtattatttgtataataaaatataattttaaaaatacaagaaatttctcatataaaaatatgaaagtaatcagactgcaacactcagtgcctgagacagagctacagctatcagggtgtccagacagacagaagattacattttcttccttgctccttgtacagccccagacctgcatgcttcattgaaaagaaaagaagatacctgaattaaatcaatgtgatgcttagtaccctatcagtgcacatttcttttctatttttaaattttaaaaataacacttggccaggcgcagtggctcacgcctataatcccagccctatgggaggccgaggcgggtggatcacctcaggtcaggagttcgagaccagcctggccaacatggtgaaacccctctgtactaaaaatagaaaaatattagccgggcatggtggtggccacctataatccaagctactcagctgaggcagaaaaattgcttgaacccaggaggcagaggttgcagtgagctaagatcatgtcactgtattccagcctgggtgacagagtgagattccatttaaaaaaaaaaaaaaagaaaaaaaaacacttatggcggtattctcagtcattacaaataaataaaaacaatccatatgccctggagaatttgattccaggagtaggtctagaagaacttcaactggagaatggatagagaaatcatggtatatttgcagaatatatattatatatataatagatagcatgtgaataaattaattacaaaaacatatgactacatctattattatatagcatgtagataaattacaaaaacatgtaactacatctatgaatcttagagcataatattgagtaaaaaataaataaataaaaattaaggccagaagataacacatagcacaatgtccttttcataaataaatatattgcttaagcataccttatatatagaagataaagcttaaaaagtaaagaagaggccgggcgtggtggctcacgcctgtaatcccagcactttgggaggccaaggtgggcagatcacgaggtcaggagaccgagaccagcctggcccgcatggtgaaacctcgtctctacaaaaaatacaaaaattagctgggcatggtggcacaagcctgtaatcccagctactcgggagtctgaggcaggagaatcgcttgaaccagggagtcggaggtggcggtgagccaagatcacgccactgcactctagcctgggcgacagagtgagactccgtctcaaaaaaaaaaaaaaaaaaagtaaggaagagactgataagcccgatattcaggacgccagttacctctggtgcaggcagacatacatcattagtaatgtgctagttcttagggtaggtggtaggttcacagatgttcattttacttaattaaatatattttgaaaatttatttaaagctttctgttgtaaaatatatcacagagaaaaccacatgaaacaactataaagcttaacattactataaggtgattacttttgtaaccaccacccaggttaagaagaactttgtcagctccccagaaatgcttcacataccctagcccaataaaacctcctttgcaaatactcttcatagcactatctgatatgccctttatttttaccttttttaaattaaaacaaaactttttagagacagggtcttcctctgtcatccatgctggagtgcagtggcccaaccacagctcactgcagcctccaactcccaggctcaagtgagtctcctgcctcaatctcctgagtagctaggactacaggcatgtaccacccggtctggctaattttttaaacatttttagtgatggggtcttgctatgttacacaggctggcctcaaacgcctcgtctcaagcaatcctcctgccccagcctcccaaagcactgagatcacaggtgtgagccatcactctcagcctgccctttattttttcatgaaagaaattgctgaagaggactaaaagaagttttagtaagcattcaataaatgtatgttctttatagtttccaaatcagcaaatatagacatcctgcatttttaaggagatttatatattttattggacatgctgtaatttatttaaccacttccctgttggtagacattatttccattttcttctgctagattaatgcttgaaaaaaatgtgtgcctcctaaagactgtgatgaaagttgcctctgaataaaactcaaacaaatcattaatcattaactctttccttacttgtatgctctttggatgctctactgtgttatctataaaataaagtttgaagtgaaaaattagggtaaaacattttatatcatttttaaaggatatatacatggatgtacttacatatgcatgtttaaatttatataccataacatttattctttttttaaaaaagtcttatgaattttaacaaatgcatagtcctataactaccaccaccacagtgaacatccaggacagttccatcccttgccaaacaaacaaacaaacaaaaagcttcacccaagtcttaagtccaggcacttactgatctattttctgtccttatagtaatgacttttccagaatgtcatataaatgggatcattcattagatatccttttgtatctggcttctttcacttaacataaagcatttgaaattcattcatattgttgtgtgaatcaataatttatacctgtttgctgttgagtatattctagtgtatgtatactatattttgtttataaattccccaattggggcacatttgggtatttcccattttgggtgattacaaataaagttattataaatatttgcatataggtttttttgggcaaacctaggttttcatttcacttggataaatacctagaagtgggattgctaggtcacatggtaagtgtatggtttattgtgagaaactgccaaacctttccatagtggctgtaccattttttcattcccaccagcaagtatatgagagttctaattgttcctcatccttcccagcactggtattcttttctattttttctttttttttgagacagagtttcgctctgtcacccaggctaaagtgcaatgccgtgatcttggcttactgcaacctccgcctcccgggttcaggctattctcctgcctcagcctcccaagtagctgggattacaggcacccaccaccatgcccttcttttgttttgtatttttaatagagacggggttttgccatattgaccaggctggtcttgaactcctgacctcaggtgatccacccaccttggcctcccaaaatgctgggattacaggcatgagccaccacgccctgctcttttcttaagtcattctaataggtgtgtagaagtggttctaacttgcattttcctaatgactaatgatattaagtatacatatatttatatattattttataatcttatatataatatacatattttatatattatatatatattttatatatatatacacacacacacacatatttttttctttttttgagacagggtatcactctgttgcccagattggaatacagtggtataatcatagctcactgcagcctcgatctctcaggctcaagcgattctcccacctcagactctgtagtaactgggactacaggccatgccaccatgcctggctaattttttttttttaattttgtagacatggggtctccttgtgtttcccaggccagtctcaaactcctggactcaagccatcttctcgcctcagcctcccaaaatgctgggattacaggcataagccactgcacctggccttagttaagtttttatgtacttattgtatatcttcattggtgacattcaaatcatttcatcctttgtaattgtatactaaggaattaaacgattgtttaattattgtttattttcttattgtaaggttttaaaaattctctatttttttgagacgcagtctccatcagtcgcccaggctggagttcactgtcgtggctcactacagcctctgcctcccaagtttaagcgattctccagcctcagcctcttgactggctggaattacaggcatgtaccaccatgcttggcttatgtttgtattttcagtagagtcggggtttcactatgttggccaggctgtctcaagcttctgacctcaagtggcccacccaccttggcctcccaaagtgctgggattacaggtgtgagccactgccacgaccttaagagttctttattctagatacaagttctttatcagatattgattttcaaatattcttttgaagtctgtagcttgtcttttcattttcttaactgtgtcttttgcagagcaaagattttaattttgatgaagtttgatttatcaatgttttcttttatggatcatgcttttggtatcatatccaaaaactctttacataacccaagatgtaaaagattgtcttctatattttcttctacacattttgtagttgtatattctatatgtaaggtttataatccattttaatttttatataaggtgtgatgtataggttaagctcattttagttttacatgtagatgttcagttgttccagccccatttgttaaaaaacacccatcctttccccattcaatagcctttgaatcttcatcaaaatcaattagtcatatttatgtgggtctatttctggactttttgttccattaacttatgtgtatatccttttgcaaatatcacacttatatttgttttttttcttacatttttatttcaaaatctaaggacatcttataacccagaaatattttttataccttgtcatgtcttagaggaaagagccaccccagtcttttttcattgatgtttttcttctctcttcgtactccagaggtagatgaaaaccagagggccacaatgaccatggtgatgcctgaggtcattctggggcacagacctcagcctaggttactccacttcgcctatctttagatccaaaactaccctgctgactgctgagataaacaaaggagaataatcaggttggggaaaggatttctatgcgaagacatgtctccatgcagtcctcctacactgagcagagcatgagtcaggtgcttagagcaggattttgtcctaaaccaggaacttcagagttttctgaagaatgtggctatgtaaagcacccccccaccccacccttacttctcaagtacattacgtggcaagtctgaaaaaacttacacttctgttgttaaatgtgggggataaaatataaacttagtttcaagaggaagctatcttgggaggtaatgcaaataattcgttgtgtgtttcctgaataagtgacaggtgctgactaccattgatgcttcattgcaataaaatgcaaagctcccccaagaatttttgaaatgcatcaagctaggtgttctaatctagcaaaaggacctgcatacatgaatttttcatgcttttgccaagtcttttgccctttagtttagttaagggccccacatgaatggaaagcctgtgttgtcagcttaattttgtagttgtggaaaccttccagttttctcctttgtctaataccttcaggagttcaatcctaggttgaagcttaatttaataaccatgtggcatgtaaagtagaaaacaaaacatcttttccttagcatacagcaaaaaaaaaaaaaaaactcactcatggatgtagtgtacacatgccagtggatatatagtcataactgcagtcattggtagcacagaaataaatgtgcattgaagacacagagatgaatttgaattccggttccatgagctaccattctttgaccttgggcaagttgcatcacttctttgagcctcagtttccccatctgtaaaatgtggatagcaacatctacctcgcagagttgctgggaggatcagatgaaatgatgggctagcccagtgtctgacttactgtgtttaagaaatatcaactattacgctacttcccagtgacagtccaaatgcagaccagtgttataactctacttctcaaacattaatgtgcatgcaaatcaccgtgaccttcttaaaatgcagatcctgattccctaggtctggggaaggcttgaaattctacatttctacctagcttccaggtgaagttgaggacaacactttgaaggcaaggtggtaaaagacgcttgcacgtgcaaatgttactttgtgtaactaatggttcgcaatactgtctgcactttagaagctcccaggaaaagaaaatctttaatgatgctgacctcatctccaaaataatgtaattttaacagatccaaagtagtgcctgggcattagtgtgttttaaaagcctcccaggtgattccaatgttagccaagattgaggccctctgcttagtgaatctaatttgcagctgggcttgagaaaaaacctcttcatagaattgtttgcatcagtgtcttgattgcctctgtaacttacaataagcaagaatgtttcaggatttcaaaaatctattgcattgcctaaacctcttattttgtatggagtaatcaagctcaaagtttgcatgtcttagaaactttacttggggcaaaattagaccaagtaacaattaatcttctaggtattctgagctattcagacatatgattcatgtttgctaattgctcttttctcttgtaaatattagctgaaaaatgtcacctgtctgacaagtagcatattttatgcctatcactcctggcacgcattcttacaaggcagacaggaaaaataggaagaaaatggacttttatcaaaggcccaggcagtaaagaggggagttctgctgtaagctaaggggagttccagaggaagttataggcgttccctttcttatgacaagaaagcatagtgcagtaaataaatttgctaaatagattcaacagtctctacccaaagtcatctatttaattcttgttgttatgcagactcagcaactaaccttccttgtaagccccattttcttccctgtttcctgtttatcaaatgtaattaaacaagagaagtattatagaagagtaaaagtagtaggtaattcttgaacttggcatatgattactacatatttgatgaatagttgaatattattcttcaaggacagattggatttggtatcaggtggctctgcattaagttataagggacttaataactcaagtatttaaggacggcttccatcataaagggatctgcccttaagagggtcccattatggagattctgaggtgagagctattccaagtgtgcagtggattaaaataaaagaatcatacaggaaatctctttttacatgccttattccagggtctttgcaacctggcacagcaagtgcagatatgattagcattgttttacacatgtacactcaccttatagccctgcccctgtgcccctcctgcacaaaagaatgctgggcacacgtgaactcctctctgtagaaaggcacattaatgttctagccatggttaaaacagggatagaggcaagccaaaaatgtcggtcatttgaaataaatctcaagtttgtgcatatcactatcaagtgtgctgtgtggcaattaagaatgccaatttgtgtgatcacaggcaagttgcagtttgatgaaaggaaagcagaggtgaatatataaccagggtcatcctttctttctccctctctctctttctgtcatttatttgccaagctcttaactagaacttgctatgtgctaggtactggatatatcaaagcaaactcagcctggtctttgccttcaaagatttgcaggatagtgggaagaaaaacttgaatcagaggacatctgcagtgggaatcattcaagcagcagaaaacccaaaagttacttatactgtgaaatctgatcagagaatggactgtcctggttagtaaaatatcctggaggataaagattggccatgcattccacatatgaattaccactttcccaagaattaaaacatggtacgaaagaaaggaacgaacatttgctgagtgcctactgcctgccagatctaggcacttcacatgtaacacctcgtccagcctccaccacaatactgagaggtagagttcaacctcattttatagataaagaggctgaagctcataaagattaaaggacggactcacagtcaaaggactcctaatcctgagtcagcatttgaacccaggctcacctgtcactatatcctatgctcttccgtatcacattttatactgaaacaacttctggaatagctaatgcttagaagcagctcccaaatatttgttgaatgaatgatttgattgaatgaatgaataaatgaatgaagcaagctctactgaacataatttgatctaatcttctgtgattattcagaaactacttcaagattttcctatacctccatcataatgaatacccattcattaatgatggaagcagcctaattttgtcatttttcacactttattgatgtaacactacctttactagtttggccactccttatgctttttttatagaactatttagatcaattcaacttttaaaaaataaagccacatacccctgtggtagatgaaaaacaagtatcatttgcactggtaaatagagaataggaagaaaaataaatgcagtgaaaataaagcagtgttatcaaatcctacccagatactgttatctacccggaagcttcctgtttgattaaaaggaaaaatagccagtgttagaggtgtggaagtctagttgaaattatatgcaattgaaggattaaaatagaattgaaaagggaataaattcctctctgaataatttaactccctttaggctttgattctgcctcatctaaaatcatcttacatacttctagtggcgtgtccctcacattttggtaaactctgagtggaaactacggattttgtagtcaaacatctgactggctctggattttaactttactaacatatgtcctgaagtgaactgcttggagccagtttcctcaactatataaccataatgacaaaacaggtttcacggtcatgttttcagtattaaacaatatagttaaaagtacctagcacagtgcctggcatagaacatactagatatacattaagtatcagttccatttttcctttccctttattgtcagaaaatagaaagcatctacagtgggcttgtatgatgtggtggttagaaatacctgatctgattctggctgtgcaatcttgggcaagttacttaacctttttgtgcctcatttttgttttctgaaaaaaaggatagaatattattacctaccttgctggcttctgggaagaagctcagtgagacgatgtgttagcagagtgtctgacaattgtaagaattcaacaagtaatagttattattaccatcactggtgagaggaagtgatacctggcacaaaaatatatggattaatcaatatggattgagggaaacaaacctggagaataggatgtgaaggtatttaagtaacatgagctcagaccttgatggtagggaagtcgaaaggaagcattttgttcttatatgacagatgacctggaatgactgcagggcttggggggtcagggactggaggtgggagaggcctctgagagcaagcagtgctgtccaccagaagctcttgctggggtgcccagagaggagcaaagggcagtcagctgcacaggagggaatgtttggaggagagagccacctcagatcagcgggtcaagaatcccactcttgcccagatggatggggcaaaggagaaaaaggattcgccacgggaatgtccagataagacaggtgccttttggaaaatgggggtgagatgggtctcaggttacacttcgtaagaactggaatgtaaagtaaaggcagacaatgacaaaatatcttgttttcttttcagctttattcacagtgacagtccctaaggaactgtacataatagagcatggcagcaatgtgaccctggaatgcaactttgacactggaagtcatgtgaaccttggagcaataacagccagtttgcaaaaggtggaaaatgatacatccccacaccgtgaaagagccactttgctggaggagcagctgcccctagggaaggcctcgttccacatacctcaagtccaagtgagggacgaaggacagtaccaatgcataatcatctatggggtcgcctgggactacaagtacctgactctgaaagtcaaaggtgagtggtgtcaaggactagaatccatggaagcatctctccaacagaggatctgcaagtcacagaaacccattaaaggtagctcaagcaaaaacaagcaggctgcttttaaggagacagctatttcagagaaaatgaaagcatctgctcggaaataatttttgacatctgagtacaaagcagccgaagtacaagtgaaagggggtaggacctataggaataaaatgggactggaggaagccaggaaaattagtccctgaaatgtgggagggtatgaaaaataagctttgcctaattcacaattctcccatggaacatccctgacttgattattaagatactctttttcaatagtttataccctgaatccagagtttttaaaaccatggtttgccgcccattcatggattaaaatatcaatttagtgagtagcaaccagatgcacgtttcccgccctttaaaaaataatgtatagaagagaatagacagagtagatcagacgacatcacagagtaggactgagtactgtaaaactaatttctgagggacgtgtgtgtgtgtgtgcgtgttgggtcatggtataaattttttttttcttactttggatcataaaaagttacaagtttggaaaacactgctcaaatgcaagccctatttattgcagatgaagtagctgagatccagagaagggaagtgggtagcccaagagagtcccatgaagtctatagctgtccctattcctctggattcagggatctctccactccagcacaattgaaaatctaaatataaagagaatcttcacactcttgtttgttctagaaaaggtgatttgaggaaagacatataacaactataaaaaatagattttgcttgttcattggcttatggtctccaggcttgaatgctctgagataaatgatgccaatatttctctggcctcttcccctcccacgcattggacctcagatggtctgtactgtcttctagagggtttgtgggttttggccccaaaaaaccattaaccttggcagaaagtgtgtgactttatgatctggtacaaagaaggacaaactagagggactggacatgaggatgaatattgtgttcgcccttatccttgggcaggttattttgcctttcataacctcacattttgcttatttgtagaagacgaacaatagtagtaccaaacacacaggattgttgtcaacattgagagagataatgaacataaagaactgagcatggtacccggcatataataagtgtccagagacttggttaaaagaccctcagttgttacaggggcagtgacctcctcacacctcaaccatcaatgagtcaccaggaaagccattagcctagatgtaactgttttctatctttattgcatttcctacatccaggcagcagctgggaggaactctagaacactgaagtttgtctgagttcccttaatgtaaggctgtacattctcaggatgccttgatgtactcgaatatctgcaaccctaaatcaccacctctgtttttattgatctctatctgaatgctgtattaatgggccaggccttctgcccattctctcaaactgagaactgtctctcattcctggggaggcaccctgcctactccttacctagatcagggatttctcagttgtggagagatttgttccttatagtgttggtcatcaaactgggatatttggggattacaaagacttttcaagggatgtatgggcacaggcagttttaggaagtgagttcctagatcctcatcttccccaaatactcgttcccaaaattgacgagcctgacaatgtgcatgccaggcaaggctcttggggttcccctaaaacacttcctcttttaagcctaccactcactcatcatgaatatagtccattgtcccagggtgtaaaaccctctatagtgttaaataaaagaatgattgggaacattgacacctgatggaactgttatgactaaaaacccttttgcaaataatgtggtatctaattttctgctttcaacaaaattgaaggaggcccttataaagttaataactgataatcaaaaatgagtaatttttgccatgtaaatcaggtcaaagaatgaaatggcattgctgtaacgaaactgcttccattcccattgatttactcatacgaacaagattccttagcctttataagctacaaaaaaatgaaaaatagaaatagaattgaggctgaattctattatataaaatcattccaaccatgtcatatggttcttcggattcatgaataatttggaaaagagagccatatccatcttattaagggacacattcccaataaattttcatctttcatgtttaataattatcaatattcataacattttacattttgatcaaatatgtgttaataataatagaaataaatgtccaacaacgatagactggattaagaaaatgtggcacgtatacaccatagaatactatgcagccataaaaaatgatgagttcatgtccttcgtagggacatggatgaagctggaaaccatcattctcagcaaactatcccaaggacaaaaaaccaaacaccgcatgttctcactcataggtgggaattgaacaatgagaacacatggacacagggaggggaacatcacacactggggactgttgtgtggtcgggggaggggagagggatagcattaggagatatacctaatgtttaatgacaagttaatgggtgcagcacaccaatatggcacatgtatacatatgtaacaaacctgcacgttgtgcacatgtaccctaaaacttactgttaaaaaaaaaaattagatcttaatgcagaacaccctgaacatttaaagcttcatagtcacaagagaaaagttttcatttcaatagctataaatattttgttgttgtaaagacatataacgataatcaatacaaaatctgtcaaacaaaaatatgttacattaagataaaattctgtagggaaggtgaaattggaagtgagtttcaatgaatgaaaagaaacaatttagacagagaagaattttttcatttaataatttatttatttttacttagaaggaattgaatagattaggttccttacccaaaaagcctctgttatttgtcttatttatttattctcttttttccacattctccagtctcattccccttttttaacacaggaaattattccagcatgtttcatacatattcttttgtttgtaagagcttatttaaaatatgtaatattgttttagatgcatatattttttttcttgtggaaactatattgtactatatatatatattttagaaatggacacattaggccgggcgcggtggctcacgaccgtaatcccagcactttgggaggccaaggcgggtggatcatgaggtcaggagatcgagaccatcctggctaacatggtgaaaccctgtctctactaaaaaatacaacaaaaattagccgggcgcggtggcgggcgcctgtagtcccagctactggggaggctgaggcaggagaatggcgttaagccgggaggcggagcttgtagtgagccgagatcgctccactgcactccagcctgggcgacagagcgagactctgtctcaaaaaaagaaaaaaaaaaaaaagaaattgacacattaagtttattgtgaaaacatgattacaagcaataacagatataacagcagaaaaaattgtgaagttatgtgcaccttcttttgagatcatttttttgggtatatgtgaatgtattttatctttttttaattgacaataattgtacttatttatgggatacatagtgatgtttcaatatatacaatgtatagtgatcagatcggggtaattagcatatttatcatctcaaatatttattatttctttgtgttgagaacattcaatgtaccccttctggctatttgaagctatatactgttgttaaatatttatatgtatttttcaaggataatgttgtatataaaagataacttcttttatatttagtcacctttggatacatatgtaagagtaaaataattgttttactaaaaaaattcataagatgctgaacattatatgtttttccagtatagaaacttatgaaaaattataagaatcaacttaataggtgagaagagcatactgcatcatacttattttaggaggaatacaagcaaaaaaaaagttggaccatcacctaagagtaggctaccctgatccagggtctctaaaagaagcaagatagatctgaggccccaatgagggttcccatgaatgaagtaggactagaagaaggacatgtttttatcttaaagtgcctgatccatggcataaagcttgaaaatgggtttgtttatagcaccttcgttgatgtctgggcagaaattcttatcaaatataatgaaaagagttaatttcaaaaggacagaacaaattatgaggtggaatgaccggagattctggaagagacagtgataaaggactgtggtttctgaaaagccaggtggcacctacatttctgggggcaatccatctgaggaaggggcgggagcatggccaaagaacagagaggccccaggagcccaggggtctctcagaggagctggggttgagaactggtctgtgcaaaggtttccagacagggttgcagaggaggcactaaaaacaagaacaccaagagccaaaccatcctgaaggcctgggcagggcagggggatgggaagagccaacaccaggaatgggctgaagctgacagaagtacttcaaaccagaaacaatgaatttaaactatgccctaccacaaatagacttaacagatatttacagaacattctacccaacaatcgcagaatatacattctattcatcagcatatggaacattctccaagatagactatatagtaggccacaaaacaagtctccataaatttaagaaaatcaaaattatatcaagtactctcttagatcacagtggagtaaaactggaaataaactccaaaaggaaccttcaaaaccatgcaattacatggaagttaaataatgagtgatcattgggtgaacaatgaaatcaagatagaaatttaaaaactctttgaactgaacgataatagtgacacaacctatcaaaactctgggatacagcaaaagcagtgctaagagaaacattcatagcattaaatgcctacatcaaaaagtctgaaagagcacaaataggcaatctaaggtcacacctcctggagctggagaaacaagaacaatccaaacccaaacccagcagaagaaaagaaattacaaagatcagggcagaactaaatgaaattgaaacaaaaaaaatacaaaagagaaatgaaacaaaaatctggttatttgaaaagataaataaaattgataaccaagaaaagaagagagaagatccaaataatctcaattagaaatgaaatggagatattactactcatatcacagaaatacaaaagattattcaaggccactatgaacacctttacacgtacaaactagaaaagctagaggagatggatacattcctggaaatatacaacccttcgattaaaccagaaagatataggaactataaacagatcaataacaagcagcaagattgaatggtaacttttaaaattgtcaacaaaaaaaaatccaggaccagacagattcatagctgaattctatcagacattcaaagaagaattggtaccaattctattgacactattccatgggatagagaaagagggaatcctccctaaatcattctatgaagccagtagcaccctaatacaaaaaccagggaaggacataacaaaaaaagaaaactacaggccagtatccctgatgaacatagatgtaaaaatcctcaacaaaatactagctaaccaaatccaacagcatatcaaaaagataatccaccatgatcaagtgggttttacaccagggatgcagggatggtttaacatccacaagttaataaatgtgatacaccacacaaacagaattaaaaacaaaaatcacatgatcatctcaatagattcagaaaaagcatttgacaaaatctaacatcctttatgattaaaaccctcagcaaaattagcacagaaggaacatatcttaaggtaataaaagctaactacgacaaacccacagccaacattatgctgaatggggaaaagttgaaagcattttccctgagaattggaacaagacaagacactttcaccacttttattcagcatagtactggaagtcctggccagagcactcaaagagaaagaaataaagggcatccaaattggtaaagaggaagtcaaactgttgctgtttgctgatgatatgatcatatacctagaaaaccctaaggattcatcttgaaagctcctagaactggtaaacaaattcagcaaagtttcaggatacaaaattaatgtacacaaatcagtagctctgctatacaccaacatcaaccaatagctgcaaaaataaaataaaatacttaggaatatacctaacgaaggacatgaaagacctctacaaggaaaactacaaatcactactgaaagaaatcacagatgacacaaacaaatggaaacacatcccatgttcatgaataggtacaatcaatattgtgaaaatgaccatactttgtagattgcaaaagcaatctacaaagtcaatgcaatccccatcaaaatactaccatcattcttcacaaaagtagaaaaagaaatcctaaaattcatatggaaccaaaaaagagcccacatagccaaagcaaggaagactaagcaaaaagaacaaacctggaggcatcacattgcctaacttcaaaccatactataacaccatagtcaccaaaacagcataatactagtataaaaataggcacatagaccaatggaacaaaacggagaacctaggaataaagccaaatacttatagccaactgatctttgacaaagcaaacaaaaacataaagtggggaaagtacatcctattcaacaaacggtgctgggataattggctagccacatggagaagaataaactggatcctcatatcttaccttataaaaaatcaactcaagatggatcaaagacttaaatctaagacctgaaaccataacgattctagaagataacatcgaaaaagcccttctagacattagcttaggcaaagacttcgtgaccaagaacccaaaagcaaatgcaacaaagacaaaggtaaatagataaatagggacttaattaaactaaaaagcttctgcacagcaaaagaaataatcagcagagttaacagacaacccacagagtgggagaaaatcttcacaatctatacatctgacaaaggactaatatccagaatctacaaggtatgcaaataaatcagcaagaaaaaaacaaacgatcccatcaaaaaatgggctaaggacatgaatagacaattctcacaaggagatacacaaatgaccaacgagcatatggaaaaatgctcaacatcactaattctcagggaaatgcaaatcaaaaccacactgcgataccaccttactcctgcaagaatggccataacaaaaaaataatagatgttggcatggatgtggtgaaaagaaacactcttacactgttggtgggaatgtaaactagtacaaccactatggaaaacagtgtggagattcctttaaaaactaaaagtagatctaccatttgatccagcaatcccactactaggtatttacccaaaggaaaagaagtcattatacaaaaaaaagatacttgcacacgcatttttatagcagcacaatttgcaattgcaaatatatggaaccagcccaaatgcccatcaatcagtgagtggataaagaaaatgtggtatatatattatacatacatatatatatgcatattatatatatacaccatggaatactacttagctatgaaaaggaatgaaatcatagcatttgcagcatcctggatggaattagagactattattctaagtgaagtaactcaggaatgtaaaaccaaacattgtatgctctcactcataagtgcgagctaagctatgaggatggaaaggcataagaatgatacaatggactttcaggacttaggggaaaggatggttgggggtgagagataaaaaactccacatttgggccaggcgtggttgctcacacctgtaatcccagcactttgggaggccgaggtgggcagatcacgaggtcaggagatcaagatcatcctggctaacacggtgaaaccccgtctctactaaaaatacaaaaaattagccgggcgtggtggcaggcacctgcagtcgcagctactcgggaggctgaggcaggagaatggcaggaacctgggaggcggattttgcaatgagcagaggtcgcaccactgcactccagcctgggcgacagagcgagactccgtctcaaaaaaaaaaaaaaaaaaaaaatggccttcaccctaagaaggaagaaaccaagggcagaggaaggaaacaatcaaagagaagcaaggcagcagtgaaaagacaactgtacgtttaagcctctaaggcccaaggaaagcatttgctaaaagagccaagtctcagtgtctttttttcccttggggaaacagaagggtgtaagaaaatcggagtcaagaaaatgtcctgagctccgcctgcagtagcgggaagcctaggagtaaaataacacgttttttaaaaataaagaaagaaattattttaaaaaagaaaacaatgtcctgaatttcaatggggtgggggggaggggaagctcctggggattacaaactcgttaacctgctattccttttcaggcaatttaacagatgaattgaaagcagtcctaaaagatttaactgattactagaaacttgcatagatcctctaagaccaaggcatgtaaaactacatttttccatttatttactgtcattatgactataaaacagatactaccatgtatacatttcatctttatttcagaaattacagcattgcttgtaacatatctgtcagacagccagaacaaaccagggaaacagaaaccatttaaacctgtggaaatctaaagctgaaactagtaattcttttaatgagggagactgagaagccaaacagagaacagggaagcaattcagaaattagcaatagcagaaagctgctcctaccactaggctatagtgaaaagggggaaggcagggttaatggagcccagggattaaagtcacttgacagacactggaacccagtgggcctgtccattggtatctggagccagggaagagatacatcttctgctggagaggccacaaaagtatagagcataggggagaaataccttcccttctccctccagtccaccctctagtgttcctgtcttgcttcctattggctgtcacgttcctaggctatacaggccacaggagtctgccttcctgcaacacagagcagagaagaaaaagtgagagatggatctgaaggcaaacagacccaggacacacaaagcacacacaccttgtgtattgggtggtaaaaggtgggataataatacagttgactagatctataacagactgaaaagctagtagttgttgagtcagggacaacgaaggctggctgatggcctcagtcaacttggagacaatctccaagtgctaaggggtctgttattcaggttgtaaggatatagccaacctaactgagcagcagatcatatatttagcaaaactgatcttatgaccttaggttacattaaaaccctggatatttgtgctgcttagataatatctagaatatagattgtgttacatatcctttttaaagaacgtggcaaaactaaactataaccaaagactactatctggaaatgggtctgaagactgtatcttgtgagatatagttaaaggaggtaggcatgttttacttagggttgaaaagactagatggagtcttcccagttatattcaaatatcagaagggttacctgcaataattgctaacactaattgagtgtttactacgttctagacatctaactaattatttaacacccttgttaaggataagtattgctgtatccatttcctaaacaagaaaactgagggtttaagaggtcatataactagcccttggctaaagcctactcaaactgctcagattctgaactcatgtttttaactacggtgcttaccatatgttgtgttactaaactagacaaataccaatgggtagaagctacaaagaggcacaattttgcttggcatgaagaaaatctttccaatggaagtttaacttgcttattgtataatcatggcaaagactgcttctagaggaagtaggagtttccattcatagatgttttcaggcaaaagttatttagcagtttactaatatcagaagaaaaatattactaaagataacaagggacacttcataatgataaaagagtgagttctaaaggaacacataacaatcctaaatgtgtgtccatttaacagtatagcttcaaaatattaaacaacaattggcagacttaggagaaccagtcaaatccacaattacatttgagatttcaactcatctctattacaactgatagaacaaacaattaagaaaatagaaaatctgaacaacacaattagccatcttgacctaatagacatatgatatatagaacatacacccagcaactacagaacacacattgttttcaagcgtatgtggaacaatcatcaaagcaattatctaggagaattgctgtagaaggtgtttttcattgagcaataagtcagatgacttgaatttttggagtacttccgcctcttaaattctaaaatttactcatcttttcctaagaatatcaccctcagtccagcttccccactgtgggaagcgattccttttccaccaccttccaaataagaaagaggctgtggagacatttctgatactgcaaaaatgtaggatgtgggctcctgtcccttccccaaaccttgctgattcttgtagtggaagagctctctctctgtctccctatctgctccctcatgtatcccaagtcaaagcctcagccaagctcccaattcctggcatccctacttctgaaatcacttctcaaccaggacaccaagatcagtttcttggtccaagccacctgcaatagtgggctggaccctcacccacagtactctgctcctgttcttgttctacttcattccccaaaagacttgagagcttacagaaataatctacagtatgatcatataaaatgattacaaaagacattgaaccaagggaaaataagtgtagataaataatacaaaatgagagataaagtgagtactcgaaatacacacttcgggtactgtttgattatgaaagataggccaaagttttggcttcaaggagattggtgagtctaacaggtcaagtccttcagtaggctgcttcagtgtctgaattgccttatcttctactactgctgggtgctcctaagaacctcagagcatattcctctatctgcttatgttgcaccatccctagacatctgcaattacacagagacacatcctcttatggtgattccaattaagaatgcattacaaaatagtaatatgaattttacccacctcatagggtctgcatatcatttaaatgacataatgtattatatgtattatgtatatttatacattagggggaaagatgtcagagctttttgggacataccaggaggcccagctgggtgtgctgaccacatggagacgagaacttcaagggagagccaaagtgcacgcaggttctggtggatgtttcattgtgcagtgaccctgctctctagtgaacccagatctagtgggtgttgtttgctataatgaatcaaattgtcaactcttaacattgagacccacaacacaggaggggaacagaggggcaaaaattgtgaagaacggcatgaacattccttctcttccataggatgtaaaaggacgtggcacaaagctcaacacatagaaaacaataagtaaatcatacacatcagatggttttcacatggttgttaccattattttaatgtgaaattgtttttcacaaagtttgtacctatttatacttccaacaatttaggagaaaaaagttgtatcacacctctgcctttacttcaagactacacttacttcaaaaattgtattgaaatttaatttcttaaaagaatatttcctaccgaatggaagccagtgctcatcccctcttcctctcaccaaatatcaacaggtgactttccacactgcctggtaactgcatatggtattgatatttgtttatttttagctattatctaagaccactggaaggtttgttcttgtgtcttctagtctcttggaatatcatgcctattttacttatttttaaagtttttataaggttgtaatgttttattttaattttaaaatttatttttaactggcaataatgtatatttatggggtacaatatgatgttttgatctatgtatagattatagaaagagtcaatcaagccgggcacagtggctcatgcctgtaatcccagcactttgggaggccaaggcaggtggatcacctgaggtcaggagttcaaaaccaggctgaccaacatggtgaaaccccatctctactgaaaatagaaaaaattagccaggcatggtggcaggtgcctgcaatcccagctactcaggaagctgaggcaggagaattgcttgaacctgggaggtggaggttgcagtgagccgagatcacgctgttgcactccagcctgggtgacgagcgaaactctgtctcaaaaaaaaaaaaaaaaaaaaagaataaatcaaactagttaacatatcacatcaccaagttgtttttttgtggtctttatttttttctcttcttaatctcaaaacagagaatgtaaaaaattcatgcttttagcaaatttgaatacagaatgcattaactgtggtcatcacacatggcaatagatcactaaaacatttcctctactctgagactgagcaacatcttccacatccccagcctctgataaccacctttctactctgtttctatgggatctacttttttagatttcacaaataaatgagatcatacattatctgtctttttgtgcctggcttacttaacttagcataatacccttcagttccatccatgttgtcatgaatgacagattttacttctttctaagggctgtaagtattccattgtgtatatataccacattttctttattcattctctgttgatggacatttagtttggttccacatcttggttattgtgaatcatgctgaaatgaataaaggaatacagatatctcttcaacatactaaattcaattcctttggatatatacccagaagtaggactgctggatcatgtggtcattctatttttagttttttgaggacctctatactattttccaaaatgactatacttagatctcagctttcttgaggcagggagccatatctgtttaattcactcagcatatactgcaaagaagcaggtgtgtgtatgaactgtgtgtgtttgtgtgtatgtatctgcatgtgttagggagaagtgcagaataaatatacccaactctttactatgtatagacattatctaggtctttattttttttctcttcttaatctcaaagaaaacagaggaaaggaggaagtaaaaagtaaatttttgcctgaagatgtttggaaaaaataccaaataaagtgagatagtgggtaatctagtgatttttatttttccgtcctctttctggcctccaattgtgaaataatttatagcactgtaagaaagaagccacaaattgtggtagcttggaccactgttgaggtctggaatcagaattccaatgttcaaatattggtcctaccagttataagctctatgactatgaacaaaacactcaacttctctatcttcagtaaccgtccacaagaattgggaatatcaacaatgccatctttattgcattgtaagaattaaataattcaatatatgtggaaaatagcatgatatcagggatatacaatgtgtttacaaatgataaccattattacttaatattgatagtgataattttattcatttcacatggcatgaagtaccaagctctataggaatcagaaaataaagtcttatttctttttcttctctattgtccagcttcctacaggaaaataaacactcacatcctaaaggttccagaaacagatgaggtagagctcacctgccaggctacaggttatcctctggcagaagtatcctggccaaacgtcagcgttcctgccaacaccagccactccaggacccctgaaggcctctaccaggtcaccagtgttctgcgcctaaagccaccccctggcagaaacttcagctgtgtgttctggaatactcacgtgagggaacttactttggccagcattgaccttcaaagtaagagctgcccccacttcctaggtctatcagttagggttcagacaagaaacagatggcatactcgagtgatttgaggagagtgtaataaagggactgtttacaaaggtgtgatcaccatttggagaaactacaaaggatagtgcagaacactggggcttcaatgttgggagggcaattaccactgttggagaagttactggaatcagaagggagctgtagggaaagccccacttcccaggagctgtagccacagaatagggaagctgccacatgcagcgactccaaagggtggaaactggatgaatgaataccccaactcattctcctcccaccctccaatctcctgctagcacctcccattggctgaacccagctagaagtcagagaatacaagggtccactgttgtattccataaaagtcaacttctcagggctcagagcaatattgacatgtacagaatagatctggagaggaaacagaaaatatctagtacaatagctaatcactgtgattcatgcacagtgtcatgagccagcaggatgaatattcctttgctgtacttgctgccagtcagctggttatgggtttttccaagaaatttggtctctaacaaaattcttcagagcctttactgactatgctggatatttttggaagggatcccatacttttgaacttcatacagcagaatttcaaacaatcttgggaaaataacaacttttatctgcccagtaaggacaactaacacctagtatcataatcatttcgtaagagacaggtaatttcatcaccgagtgcatatgttttctaatgctcttatatcaaattaccacaagcttcacagtttaagacaacacagatttattatctgatacttatggaggtcagaaagccagacttgagtttcactgggctcaaatcaaggtgtcagcaggattgcagaggccctaagggaagattccactttcctgtcttttccagctgctagaggccacctgcattaattgcctcatggcccctccctctatcttcagaggcagcaaccctatcattcagccttctgcttctgtcaccacatctctctctctctcttttttttttttgagatgaagtcttattctgccccccaggctggaatgcagtggcacgatcccggctcactgcaacccctgcctcccgggttcaagctattctcctgtctcagcctcctgagtagctgggattacaggcacatgccaacatgcctggctaatttttgtatttttagtagagatgggtttcaccatgttggccaggctggtctcaaactcctgacctcaggtgatccgcccgcctcagcctcccaaattgctaggattacaggcgtgagccatcatgatcagccacatctctttccctaactagcttgcttctctttgccacctcttaaggacccttgtgattgcattaggtactccatccccctggttatttggggtgatcttcccatctcaaggtccatcttcaaaattccttttgccatgtaaggtgacatattcacatgttccagggattagaatatggacatctttggggagagccataattttatttatcctactgagaagggatatactctcagactaaaggacagtccctagtactgattcaatctggctttatagaaaattcactatattgtcattgtatttcacagtttgccctttgtcttagctggtaagacagagcctatgataaggacttgtgtggcatgcaggtatttaattggcaaccccagagggcagaagcaagagatttaggagtttaagagagggtaatataagagtatattatcaaagttgtagtgtggacaacagaaactcaaatattcaaggaccagcatgtagacagcctcctaagatgtctactcagacaaagaatttcaggtggaaggacttgttcatctgcttcacgcccattggttgacaggaatatgaactccattctgctgctgggctagacatgcatgtgggctgagtgagctttccccagtatccgtagcatcagaaaagtcgcagggcagaaagaaaagtatccaatttgaggtgaattactgaccttgaagtgagtgtaagcctaactagaattctaccccagctggctgaagtgaaaggtgaggctgagaggaaataaggcaggactgcacagtccccaattgtactgttcaaatccactcatgcccttcattaagtcagctctgccactgagccttccagctgggaggcagccacaatctctgcagaagatttaatatacaccagtttgtggaacaagctgtagttcctgctgctgctgtggatcccaagccacagttgatatttgttgtctcactcatccaccatacattccagatttccctcacctaacaccccagatggaatggtttctttgcctgatagggtgacccagacttaacgaccctaagagatctgagcttttgatcagcatgcccttaacagactggggttgttgcaaatatcttttcattatcactggatatggaagtaaaaagaaccagtgaatcagcggacccctgagttccagacatactcttccttgtctccattatgtagcagtgttcaagattttcatgataatcaagattgatttctccaccagtatggtaatttttttctttgctcactggtctgccaatattaagagctcaaggtggccaggccagtagcagagctttagatgcagtagaacaagcagagtatcccctgctagaattccccgtaggaagccagacctttgattcagcagagcctaaatgtgtggggttgagtgaacttctatacgtgagtcattagaagtaatggtgagaggggccaacctgcagcactgggatagccctggtacagacgtagaacatgcttgaggaggttgtcaggaggaaatgagttagaccttgcacagaactaccaccatcaagtacagttggggtgaggcagacatggtatgagttgaggcatcagagatatctgatgctttatgccaaattaaaattaattttttcatggagtgacactgatccacagaccagactccaagaactttgcagtgactaaatacccatctcatcataactttcctggtattttcttctggaaaaaattcttccctgatacagttttcagaggcagctagatgcactgtcatctctccccttttcccacttccctacctatccacaatttactacccaatgccaacactaaagttagcccaacttccttctaactaaattattagtttagaaggaaagagaggagtcatgctaaggatcttaactgaaatcaaaacattagaggctgggcatggtggttcttgtctgtaatcccagcactttgggaggccaaggcaggaggatcacttgagcccagtagattgaggttacagtgagctacaattgtgccattgtactccactccagcctgggcaaccgagtgagactctgtctccaaaaaagaaaaggaaaggggagaggaggggagaggaggtagggaggggaaagaaagaaactagaaatccatcaattttaggaccaacttcaggtaaaaaaatgaattaggcaagttggtctttcaacattctctacctctctttatatcatggttgagaccacagacttctcacctcatgaaagatgaactctaactaattcatactaaagctaaagcctctaaagaggattaaatatgagcaatcccacgagaacttttttcccctggaattgtttattcaactgtcgttcgttatatggaatttcctgcctggttaagtgtaggccagtactttggatgaattgtagttttctagaaagacgcttcttatataagaacctctccagggaaacaggggcctgtatgagatgaattgagaaataactttacaccactgattatgtcagtgttctattctgcatggtagagatgtgaaagggcagactgaccattgctctggaagcctttacgctgtgagaagttaacagtggagtaaaatggccactccactctcttcatggaagccaacatggcttactaaatagtcaacaaccatgggagagacctgtggggtcttcatcagagctcaggatctcctagggtatcactcataaatacagccatcagggagatggagaaatctttgtgcagccagaaattctcaacctggttttacccatccttcccaactttgtattcgtcctactgtttactgacatggatcctctgcttcattaaccatcccttcctcaccacatgctctctgaacttggctgcaccttttctacctccatgccttctttgctcaggtttttccacataaatatcattatttccctctctactagctccaagcccaccctctctctggggcagctcagtcactccagggcacaagggggtctttccctcatcccacattttgagacctactacctggaccatttgtttgccttgtaactatgcttgcctttttaattgctattttattttccatgtattttcattgttcacacaagtcttctttattccacactaaggcaaaagcagagtcctgtgttcataataagtgctcaacaaatgttgggttgattgggttggagattccatcttagataatcgcagtcccatcatgccagctaccagactgtgtggacagccaggtcagagcagccaaatgatattctagcttgtggcacaaataccagcaacaaaataaccaaagtcacacatctgcctctgagttcctggcttctatttctcaagggcatttttaagttgtcttatgactgttccctttctactcattctcataaattgagctgtggactgctgtgacccacaagcttctccggaagtcaatgtataaaacaaacacggaaacgaagagtatggtgggtggagggtactccactgactctagaatggatgactgaacattccaaatttcaagcacaagttagggagcaacagatcattttccttttgaaatagggtttcttctgctcagccagttgttgtattttcattaggaaatggaatgggactacagcacaaaaaataaatataaaaggacccttgtagggctggcagaaaagagaatccttcctaggagacctggaggtgattccaggcagtggttgagagcatgggctctgatgtcagacaggcttaaatttcaaactctctctctattagctttgagaacctaaatatcctacttagccactctagcactcagtctctcatgtgtagcatgagggtgagtagtggtagacagtttatagggttatagtgaggattaaatgaaatgtgcttataaagtgcttagtactcagaaagtgtgcaaacagtaaaaaaaaatggtatatctagcaagttgcatgccttacttgtgagttcatgaagttgtggcaaggataagacaaatattttttgccattgcatcattatatcattgctaagagtatgccattattggccaggtgcggtggctcatgcctgtaatcctagcactttgggaggctgagatgggtggattgcttgaggccaggagttcaaaaatcagcctggctaacatggtgaaaccccgtctctactaaaaatacaaaaaattagccaggcatggtggcaggtgcctgtaatcccagctactcaagaggccgaggcaggagaatcacttgaacccaggaggcggaggttgcagtgagccaagatcatgccactgcactccagcctgggcaacaagagggaaactccttctcaaataaataaattaattaattaaattaaagaaacgacaaaagagtatgcaagaattttaaaacaacttagaggaatatgtatgaggatacaggctaagctaccataatgaagagacctcgaaatacagtgagaagcgagacagaagtatctttcgttccatgtaacactcaggtggttcagagcagctaagcagctatgttccatagagtcattcagtgatccagattattttcatctgttgctctgccattctccaggatgttgtccctataaaattgtcaaagctcagtcagtgccaaacccatgtttcaaccttcagaaagtaaacgagtggtggaaaacacattcaatgttttaaggccaagaccttgaaaactcactctcttagcctgaacttagattacatggctgggcccacttaactataggggaggcttggaaacatagtctctgagaagccatgtgtccagctaattccctaatactaaagttgaaagaaagaatggattaaccagcagtataccacaaggtaacaaatgactaggaggatcaggctaggtggactagaaaagagacagtcaattcagtgcaacaattccatattgacacttttcatgtagctgttgcttggctctatctagagaggactcagaggtagtttagataaggcctttgccctccaaatacagtctaagcagactgatttcctactggatgttcaactttggagtcttcagggatgagtagggcttctgtacgtggaagagactatgagggaacctgcacaggacaagggtttgcataaagacactgaggtagggacctctcctgttgtggggacagtgagaggcccaggtctccttgactcacaaagtgcttactaagcacttactagaaattaagaagcagattataatcaatatgggttatccaatgtttggatgagcaaggctccttatcttttcttcgttaatgttaatcacactcttttggatggagacaaatatctgtgggggctgagctttgggtcagatagatctgggtttgcaatcctggcattgacttttacttagcagtgatgacctcacatagattatttagcaactctgagacttacttcctcaactctaaaatgaggggctcagactaaataatgtctaatctcttctccagtaaaacaatccgtggttctcagatagcactgtgctggaggtagtggggtttgagggctgggaagttgggaggactgagcccttcccgctgagcagtttcgtccagtttttcctgtaccagcctgtcatgtttattccatgtgaatgactccagaggcaaaattcaagcttttgaatagggcacaaattaacttgagtaccctttcatttccctgtaggtgaacactcctctagccctgccttttgtcagtctggagcccttgttctaatctgtacacaccagaggactttacaaggctttccccagcctccagaattattcttctgatccaccctctactaaactcaccctttcctcagtgctaggacgttgaaaaaccgaaacaaggcaaagggccaattgtaataattcacactaaggcatgagtgactaggtttagtatattaacactacctaggatattctatttcttccaaaaggatcctgttaatccttgaaatttaacaactaatggtatagattctaagcactgtgagtacttgtcagtgggggaaagacatttttgggctgagagactttgccactgggaagagagagaggatgaggaggagaagggggatagggaggaaaaagagaaaaaagaaagaaagatgattagatgatagatggatggattgatggatggatggaaaaaaataacatgagagagtggtaaaaagcacagaatctggaaccagactgtatcttagctgggtcacttactatgtaacttagggaaagcttcctagtctctctgtgcctccctttcttcaccagtgaaatggggatcatagcagagccaacttcacagagtggttgcgaggagtggatgagctgataggtgcagagcacttagaatagggcctggtgtggagtaaatgctccacagagctagccgtgttggctgtcacccactcatgtggccagcctgttggtctacctcttagttgccatgtaacaggattctggtgcttttcctttgcccaggtcagatggaacccaggacccatccaacttggctgcttcacattttcatccccttctgcatcattgctttcattttcatagccacagtgatagccctaagaaaacaactctgtcaaaagctgtattcttcaaaaggtaagtgagttttattcatggtaacccaatgcactgggtgtctgcagcatgagccactgctttgcactgcaggcctatggcttgctgctttcatgctaaacccactcagagcttatgaaccactttgagcttgtcttgatgattatttttccccagaagaaaatggctctcatcgtcagtgagctgaacttcttacactgagttttttaaagggaatgttttgttcttatgtctgaaagagtttgtcttattctttgagccaagagctttcatcagcctcatgagagtgatgttattttggcaatgcagagagctacgtgctccgattttgctggtgggaggttgccaggatcctttctgaggattccttccattttcacccctcttttccccagtctggatatgacctgggttaaacccaccccctctcccaggaatctcaacctcacggttgggtaaggaaaggagaaaggtttgtgaggccatttggggataaggaaacagctggttggtggtgcattaacgtctttcagcagctcccttcgagtttctccttagcctgttgtattcttaccaacacactcctgttctgttgtaccagctgggacagagcatgctgaagcctttcagccctgatttcattgcttcattgttcatgtgtctgtctttggtttcctgggtggagcctgcccacaaaacccccagaatgtatgcaggcctagctggtgctttcctaaacggctcccttgtctgcactcaatgaacttctccaaagatctatacatggcctcatctatagaaagagaaatgacatgtggaaataattcagtaggagtttgcagcagcactatctgaggactaggggaattttaagtggttgttatcttacatttatactcataacttctatattttcatctgccataaaatattgtcatgttctatttgtccattgccctatgtgtgtatgtattcacttgggtgctgaccacaatatttctaactgtagaatgcaaggaattgttgccaaaagaaaaagacagagggagggaagaagatggccaggggagtgagggagaaagagaaaacaggagatggagaagaagaaagatagaaagaaaaataaatgtgggagggaagggagcttcatggtaaaggaggaggtatgtccaacagaacttcgacttttaaatagaaccacttcagagagttgtgtcaggtgcacctcagttgtcttatcttctgccattcttcttttacctctcacacccatacctcagggttcaaggcctggggcctgaggactccttaataacttcagaaatgagcagctgagtgttccgttccagctgtctttgggagaatggaatggagtcacactcaaagatagagtggaaataaatcctctcctcatccttcaccccaatcttaagagtgagtgaggatatcagtagctccgagctgggaggtaaagctcaagttctaactgtgattaggagacctttcttacaaataagaattaagtgaataaatgtgcaaacaatttcttttatatttttaatgaaccagagagaaatcatggttgcctatataacccttgtctccaactcacttgcattcagatctgctttcttacatgtgtctgccatgcacacaaacttgtgtgccatggaaaagggttgagaactgctggtgatgcagacagagctttaaaccagggtcagagggctaggctgggaccttgtgctgccatttgttggctttctgaccttgtacaaattgcctatcttctttgagatggtctttctatctgtaaaaggggaagcagcaagagaaggaacattttacagcttattggccgaacttcactgccgctagtgtggttcaacttggactacagagaaatcttcctaactggtttccctgtattcactcctgctacctccaacttggtctgttctcactttttgctataataggcttttaaaaatcataaatctaccatgtgtcctctgtccagaccttctccatggcttcttattgctcactggatgaagttccaacgagcccaggatggtttgactcatgtctccagctttaactgcatcaccatcaccttcattgtctaaagctctaaccacacaggattttctagtcctcagaggcatggcagtctttcaattccgagttttctcatacaatattgtctcttcttaaaatattttttcttgttgtccacctgagttggagtcatcttttaaatctcagctaagcttatacttcatcaagtctttcctaattctacctccacgcaccacacccattacattaaatccccttattatatgtttccatagcacctacttcttctttcagtatactcagcacacaatcacatgtctaggatctgttttaatagcttggactaccaattaaattgcatcccttttaattttccaattgattcctcaagtacccacatgcccatcttagcaagaagttcagtgtctccctcttatagcatgtacttctccacctcccacaaactgccagaaagcttacttagcccacagggccagtgctaggcagctaggttagtcctccagagggccctggttttgagcagttgctgtctactccggccatgcagaatctctggtccttccagatgtctccatccactgtgcaaaggtaaccttgctggttccgatccccacacagaccacagtgctacaagattacagttcttatggttccccaacacatgctctgtcattggtcccaaagcaggacccctatgggttgatgaggtaggaggaggtccctgccttagccacagctgcacacagccagcctcttcccttctaggccctcatgttgagcctgggacgccagtcctaacttccttctcttcagttcctcttagggccattggtatcctgaatttcttagtccattgcaaagttaagtaaagaagcagcaggcttggtccctttccttccagatggcttcttagctcctgaacagatttacccacctatacctcagtgactagctctgtgtactaaagtgtattgggagggcagccattattggtccataaaaggtcctgcttaccattttcccctaagaggaaccattcaacagtttggggctcgagggtgacctgctgggctctagagaagaagctggcaacttctgttgcaaaataatgttaaattctgcttcatctgcttgtctttacgtttcaagaatacagtaactgtgtttctctgattcaccaatatatgcccagtgtctaaaaaattacctggcatataataaatgttcaatgaaattttaaacattgaacctactatatgcaggtgagtatgctagatctgctctgtccaatataatagccatctgtggctctttttaagttaaataaaaattcatcagtcacatcttaagtattcacacactgtaagtgctcaatagccatgtacagataattgctcctgtattggacagtacagatatacaacatttccatcattgcagaaagttctactgaaaaccactgtgctagaccctttacaaacttctcatttaatttcacaaaaattgcttgtggcaaggagaagtgtctttatgctggagttaagaaagtgaggctcagaaaagttatatgacttcccaaagtcatacagctgggatttgaatacaggtctgtttgactccaaaacttgtggcctatttgttgcaaaagtgcttaatacaaattggttcagtcaatattattatctttgaacaatggaaggagaaagtaagtttcaatccaaaataattgagtgacttatacattgacttgctgagccaatggcaaagtcaagttagaatccagcagaagtcaccagctacagaatctagatctttagaacatgtcttcagatcttcagaacagtgtttcttaaactctcttgtgaaggaacagttatcatcataggctggtaacagttcacctaccagcaccagcccatgaaccagactctaagtggcacagccctagaagattgagccagaattttacagaggtttaaagaccaaatatgctggtttatggttacctgtggcccacagagaatggcagcactaacctcaggcataaatgaggtacccactgaagccaacattcaagagcaattcctatgggttaaccattgggctcctttcaaatgcaaaccctcatgaaagagactacagtgctgaatagagacctccaaattccaggccaagctcaggatagtcatgagggaattactaaaaacctggtatatagggcaaaagcagaattaggaatggactgatttcaggaacccaggcaatggcaggagttgggcattaaatcctaaaagagaatcagagtgggagggaatatgtgaaatcagaggttaagaaaaaagtgaaaacctattcatgattgcaaagatatgaaaccaacctaagatcccattgacgaataagtggataaagaaaatgtggtatatatacaccatggaatactactcagccatgaaaaagaatgagataatgtgttttgcaacaacttggatggaactggaggtcattattccaagtgaagtaactcaggaatggaaaaccaaataccatatattctcacttgtaagtgggagctaagctatggatatgcaaaggcatacagagtggtataatgggcatgggagactcagaaggagagagtagggagtggcagtgaggaataaaaaagctgcatattgagttcaatgtacactatttgggtgacgggtgcactaaaattcagacttcaccagtatacaattcatccatgtaaccaaaaaccacctgtacccctaaacctattgatataaaaaaaaattaaaagaaagatgtgaaatcaaggaaacttactggtgagcagcatcccattatgtgaacttgtgcttctgaaccagtaacttgagttactttgagccagtatcagtcacttataccttagtgcaaaattaattgatcagacattctgacctggaccagggaaggcaggcagaagtagcagtcaagactaaagcagaaaagggagagctaattctgcagccagacatttcctggattgaatacccaaattagtccctcagcctttaagtgcctgagggccaggagtagacagaggaatggaaagtgtgagacttctttgttcacactctttgcctaggggccagattttgctttatgcattaccatccgaagtcccaggccacagtgaacatttgggcttcgctatgtggatttatttagatttactttttgtcctgccatattttaatctataagccaaacagttttctcattaatcttattccatttctggaatttttccttttcagacacaacaaaaagacctgtcaccacaacaaagagggaagtgaacagtgctgtgagtaagcatgatttttacttttctttcttactttcttttctctctcagcttgaattttaaagtaaccactgttctattaattcatggaaggcaactgaatagttccagcttatagaatcttcctgtttggtagcatttcagcgaagcctcgttcttagccccagaacaatcatgccatcttttgctcggtctatattcctaagcactcctagatgatactgcactggacctctggtctcacatagttagaaacagagttaaaatcgaacagcaaagagaagatattcaactgcgatgcaattgacaatggatgtttttgcaacaaacaatgattaagaagtacattgttgtgggctctgagtcaagagtaatatgggaaaaacacaagtctcttcatgaggttgacaggtttggagctggaatctgtggaggaggaaggatatgatctaggggtcagaagaagtgggttactaaaatcattaagcctggttggatgaaaagcttagactcaggggaagcagcacatgattgtgggggctggcaagtttgaaatgtgtagggcaggccagcagtctggaaacccaggcaggatttctaccttacagtcttgaggcagaattccatcttttctgggaaacctcagttttttgctcttaaggccctcaactgattgaatgaagccaacctacatcatgggagataatcagctttacttcaagttaactgatagcaaatgataattacatctacaaaatactttcacagcaacatatagactagcatttgactaagcaactgagcaccatagccaagatgacacataaaattaatcatcacaggcaccaagagatgaggggggcagtcttggccatatatttggctgaagtaagtcaatttgtcattcctgcatgagcctttataaacagaagtaagtaaccaactactatttggtcattggagttgtccaagaggccagggttctgtctaatacctgttcatgcatgaacatgccaacctagattgcatgcagactaccagttttgggtttttgtttagttcagcaggatttttctcagctcactgcctctcaaactttcagcaacaaaaggacatctgtgatatcagaatctaccactctaagtatttggatgcaatagcaatgaatatctgagtaaatctaggtggggagtgggggcaccctgtagccaaaatgatttaacaaaatcaaaccaaaattttggaaatgatgccttggtacaatgaagagactacttgaggtaggtttgacttatctaatatcttattttctttaccaatacctaatgaggaatttaaatatttctagatagctttggaaaggtcccttaaagaggcaccagcataccactgccagatctaatccccccaaacactgttttcatcatcatcatgtcatctcttgtctctatagatcatatcaaatccttcccagagtttttcaggccttttgacaactagccacatttcactaagccaactcatctaccactcttcaacaaaacttttcctcaagttgagctgctccaccaacaccactgccatgagctcattcccacttctgtggctttgctcatgttggttatttttttggagtgtcctccctattccttcttacttgtcccaatcccaacttttggcatggtctactttaagatacagtaatgagtaactttattattataacaccaggcttctgttctaagacattagaagtgtgtttagactagctcatttaatcctcacagtagccctctgaagtacttactccctgcttcccattttataggtgaggaagaaaaacatgaagaggttaactaacttgcccaaggtatatagctaataatataagggccaataaattgattcagcaatccaggtgtccaagtccagaatccacacccatacactacactctgcttttttaaaatttaattcaatttttttttagagacagagtcttgctctatcacccaggttggagtgcagtggtatgaccgtggctcactgcagcctcaacttttggactcaagctatcttcccacctcagcctcctgagtagctgggactacaggtgcatgccaccgtacctggattttttatttttattttttgtagaactggggtctcactatgttgcccaggatggtctcaaactcctcggctcaagcaatcctcctgccttggcctcccaaagtgctgggattccaggcgtaagccactgtgcccagcctacatacacaacactctcttgcttaatctgtaagactctctcccccactcatacctttttatttttcctctgcattgtacacacaatctataccactcttaagcacatgattacagcgttattttctggctgcttctatgtgtctatattttaggtccacctggtcaatataataaagtgggatattagtgttaatgcaactatatggtatttgatatttgtctttctgtccgtttatcaatgtttcttatagtttattatataataaatttaaaaggtgtctgattttgaccaaatttgactaaatactaaaaaacaatattaaaataaattttgtttaattttagttgagtctatcaactcaaaaaagaataacctacaacaataacaagtttcagaacattttttaaattactgattttatgagtataaaaataaaaaataaaaaagtataaagaaaacaaaaataatttagaatccattgcctagaaattgccatggttaagattttaatattgctcaggcccagacagctcagggctttgacattcccacacccattctctgccatcccagttctatctcatcccaaaaccatccattatgaggagagtgtacagctctaggctgcccgggagccatcccgcactctcattttgtgactcggcatcttgggagatggagtcttgggacttagcctggacatgtcccttgcatgtacttcttacaagacttttattcagatgaatattttcccttccaacttaagaagcacagggcttgctggttttgcttcactaaccagcaactgaagcaagacctgacttgtgaaaatgcctaatagagttcagtattagcgctgtttcaccatttcctggatctcttgcctttgtgcacatgatagaattgcacttctctgtgattaatttgtagttaagtgtggtcatgtaactcgctttggtcaattaaatgtaagcataagtgatgcgtgttatttctgggtagaagatgtaagagttggcatatgctttgccatattttctttatccatctggcatggtaaccagtaacattctaggtagtaattgctccatcagtctcagtctctgagtgactaaaattgacagagtcccctgctgaccctcaatgtacatggaacatgaacaagaataagcttttgttttttatattgagattttggagttgtttgttcctacagcattacctagtttactctaatacaacatggaaaaaactggaacctataataaatagaccctacgttgccatttaaacttctagttctgaggaataataatgtggggaaatactttctatataataaaaaaatagaaaattgcaaaataaaaatatacttatgtatcattcatgtcctattaaaaatgttatttatagactcaccatattcccttcctccagaaaaatagaagtaaaaatatgaaaatgcctgtaatcatgtttttggattatggaatcaagtattgctttttacttttatgttttctgaatttttgttgtacttcactacatttttgagtgccctgatgtattactttcaaaaagaagaagaatactttctgaagccatttcaaccatccccactcacctctctagatcccagtaaccaaatacattatataggactcttcatcagtccttatcaagtttaggaagggcgatgctataccttctttaaaggacacctaccaatgtcttagttgcctttcaaagactcctagcacagctaaatgtgatggatatgctctaaggatataagagctgaagtgacttgcataaggtcatatcataacttactgttagaaatggagctagaactcagacccactgagtccttgtctgtgacacactgccctttccatttgtggaagttgttcttgtatctaactttatctgtgctactatttgggcctagccattctccctcttatgcagacaagcagataaacagtaaaactttaggagtggattatgataccatagatatatatcatctatcctttacaaaatagttattacagtcatcaagccttggttagagtttacagaccatgtatcctagctacctcatttcacagattatgacattgggggctaagagatattaagtgacttccttaagtgaaacagtagcagaccaaaagaagtcatgattcccagcatagtgctactcactcatttattcattcattcacccactcacaaacctgtattaagtttctgttatttgcaagaccctgtcagttaggccatgtgggaactagaaggatgaatttatcagtcatccaagattcttacaattaagtattaccgataaggtactcaagaaacagttctcattcacataatttgggttaaaacaaaaagaagccagctttctatatacttttggtccagtctttacgttttttgttttgttttgtttgttttcatgagtatcccgacttccttctaagaacttccacctgagaactgaccacagcgtcagcattccacatgggtgtgtttcctttcccctttcccatttcagtggtttccaatttctttttcttttggcactataaacctttcgcaaaggaaatattagacagaactcctacatgtcaagcaaattaaaatagtggtgaaattagagtggaggacataatcaccctatcatataggctatttgtccatatcatatttgtccctacaaaggcctctaaggcaggggtccccaacctctgggccgcagaccggtaccagtggcctgttaggaactgagccacacagcaggaggtgagcgggagacaagcgggcactactacctgagctctacctcctgtgagatcagcagcagcattagattctcatagaagcgtgaatcctattgtgaactgcacatatgagggatctaggttgtgtgctccttatgaaaatctaatgtctgacgatctgaggtggaacaggttcatcctgaaactatagcctacccccactcccacacccaatccatggaaaaattgtcttccctgaaaccagtccctggtgccaaaaatgttggggaccactgctctaagataccttgtgcttcttggaacatatttggaaaatcatgtagctctcaaattatccctatgtcctgaagcccaccttaccatcaatcctcagaaatacccaacccatgtcaggcaacttcacactttctttcttcaggcagcacagttgtctcagggagggaggagagtgctattagcaagaggagtcactaacagcttcactcacctgtgcccatgaatttttaatggtgtgaaaagtctgtgtattttttatggttctctatggctcatataagagggacaaacaatacatgaaagttcagagatggggacaaatatcactttaagctggggataatcagggaagaagaaagttttcatggagaaggtgacttttgaatcaggaagaaatggaaacagcaaactcttctagatagaggagacactaacaggaaaggcagagaggcaggaaggtgtgggaaagtgcacgtgaccccgttcagagagaaagccaggtgtgagataagggggaaagactgttagggcatgtattgtaaaccactaattccaggcaaaagttagattttacttactaagcaagagtgcttcagttagatcctagcaggaaatggagggtatgcttagaagaggtaactgaggcaagtttaatttataaaggtgtgtgcagcattaagggaaaccagcaagggatactgagcatgccaggatgcaagagcaggcagggaaggtgactattcctaggtctgaaggagaaaggggagggagcagttcccagaaccctagtaaaaatggcaatgagaaaggtccatctggcaggacctatggtctttaacagagggacaaagtcaacccacaacttgtctgggaggttgctgaggaatagataccccaacctctctctcaacccactgcaacactctttttcccctagactgagcccagtcaaagacagagggaggagcccagtgatgcagtctgcaatgtcatcatcctggagcatgaatagagtgcagcagggtgaataatgagtctgcaggaattaatagaaatatctgacacaatagggaactataagaggttttgaataggagaggcccctgaaatgtgctccaatattactgaactatgtgtggcccaaagaatggaagaggaacagctcttgcaataggtctgaggagagaagctgaagacttggactagggcaatggtaaaaactgtggaaagaagttttaaatgaaaagttttaaaccatgcggcttccagctagatgaacttttttaaaaaaattagttcctcactcaaattttggggaggttatatattttctaatcataaaaaatgatttttcttatttgtgggcttttctccccagatctgaacctgtggtcttgggagccagggtgacctgatatgacatctaaagaagcttctggactctgaacaagaattcggtggcctgcagagcttgccatttgcacttttcaaatgcctttggatgacccagcactttaatctgaaacctgcaacaagactagccaacacctggccatgaaacttgccccttcactgatctggactcacctctggagcctatggctttaagcaagcactactgcactttacagaattaccccactggatcctggacccacagaattccttcaggatccttcttgctgccagactgaaagcaaaaggaattatttcccctcaagttttctaagtgatttccaaaagcagaggtgtgtggaaatttccagtaacagaaacagatgggttgccaatagagttattttttatctatagcttcctctgggtactagaagaggctattgagactatgagctcacagacagggcttcgcacaaactcaaatcataattgacatgttttatggattactggaatcttgatagcataatgaagttgttctaattaacagagagcatttaaatatacactaagtgcacaaattgtggagtaaagtcatcaagctctgtttttgaggtctaagtcacaaagcatttgttttaacctgtaatggcaccatgtttaatggtggttttttttttgaactacatctttcctttaaaaattattggtttctttttatttgtttttaccttagaaatcaattatatacagtcaaaaatatttgatatgctcatacgttgtatctgcagcaatttcagataagtagctaaaatggccaaagccccaaactaagcctccttttctggccctcaatatgactttaaatttgacttttcagtgcctcagtttgcacatctgtaatacagcaatgctaagtagtcaaggcctttgataattggcactatggaaatcctgcaagatcccactacatatgtgtggagcagaagggtaactcggctacagtaacagcttaattttgttaaatttgttctttatactggagccatgaagctcagagcattagctgacccttgaactattcaaatgggcacattagctagtataacagacttacataggtgggcctaaagcaagctccttaactgagcaaaatttggggcttatgagaatgaaagggtgtgaaattgactaacagacaaatcatacatctcagtttctcaattctcatgtaaatcagagaatgcctttaaagaataaaactcaattgttattcttcaacgttctttatatattctacttttgggtaagaggtttgctcagggtcttgcaagtcagtaagtttaatatcctattacgccatttggctcccaaagatttgaaggcctttgaggcaaacttggatgtacttttcagcagggttgggtcctagggatgcttgatctggggctcctgctggaggaggagcacttcctaacaccacagagagcagggcaggagacaaggccttcttccctggaagaagcccacctatgctgcccctacccccacccatgccccagatatgtgattggcatgttgaatgcttggggagttttgtttaactctgttaggaacccagtggcataatggcttctgtcaaaatattcccatctttgttcctagattggggctatcttttagattaccaaatagggagagagcaatctagctgtagtatcctgaaatctgggttctgtcaggggagaaaatcataaggcaatgtgtcttagcttcagaaattttctatactacagcatgctatcttaacacctaacatttatcaagtacttgctattgcccaatattgttaagcattttacacatactattggaacaaatcatccccaaactctctgaaaaagacactattaattactccattttacagataaggaaaggcacagagaggttaagtaatttggttaaggctgcttgttcagtttgaaagggatggaattagagcaacaaacctatattttttgttacacaccataatgtgccctgatttcctaccacatggggtttaaagtggtatttttatactgtgtggtctctttgctggtcaataattaatttcagaaacaacagatgctggcgagggtgcagagaaataggaacacttttacactgttggtgggagtgtaaattagttcaacccttgtggaagacagtgtggtgatttctcaagggtctagaaccagaaataccatttgacccagcaatcacattactgagtatatacccaaaggattataaatcattctactataaagacacatgcacacgtatgtttattgcagcactattcacaatagcaaaaacttggaaccaacccaaatgcccatcaatgatagactggataaagaaaaggtggcacatatacagcatggaatactatgcagccataaaaaaagaatgagttcatgtccttttcagggacatggatgaagctggaaaccataatcctcagcaaactaacacaggaacagaaaaccaaacaccacatgttctcactcatatgtaggagttgaacaatgagaacacatggacacaaggaggggaacatcacccaccagggcctgttgagggggttgggggaaagcagagaagagcattaggacaaatacctagatgacatgttgatagattcagcaaaccaccatggcacatgtatacctatgtaacaaacctgcaggttcagcacatgtatcccagaatttaataataataattaatttcactcttttccagggaagtgctataggagtgtaggtggcgtgtgggttctggcatcagagattcaaaccccagctcaactaggtatgagttatacaactctgaatatattggttgacctctacgcatcagtttacttcaatatagtgagacctggccaggcgtggtggctcatgcctgtaatcctagaactttgggaggtcaaggtgggtgaatcacttaaagccagaagttcgagaccaccctggccaacatggtgaaatcccatctttactaaaaatacaaaaattagctggggatggtggcacgcacctgtaatcacagctactcaggagactgaggcaggagaatcgcttgaatctaggaggtggtggttgcagtgagccgagatcacaccactgcactccagcctgggcgacacagccagactttgtctcaaaaaaaaaacaaaaacaaaaacaacaacaaaaaatgcatatatatatatatatatatataaatagatatagtgatatagtgataccccatctctgcaaaaaatttaaaaaataaaaataaaaaaaatttaaaggggccgggtgcagtggctcacacctgtaatcctaacactttgggaggccaaggcgggtggatcatgaggtcaggagttcaagaccagtctggcgaagatggtgaaaccctgtctctactaaaaatacaaaaattagccaagagtggcggcgggtgcctgtaattccagctactcaggaggctgaggcaggagaatcatgtggacccgggaggcagaggttgcagttgcagtgagctgaggtcatgctactgcactctagcctgggcaacagggcaagactctgtctcaaaaaaaaaaaaaagaaaaaaaagaaaagaaaagataaagaaagcagttatctttctcagtttatcatgaggattttgagcacaggttttgtcatccccttagactcctagagagcagggaaggagtgagatttttgccatgtacctggtacgtgataggtacctcatgcatggtcacctctgagactcattatgtattgggagaatggctactattaagacttctactttttttttttttttttgagatggacttttgctcttgttgcccaggctggagtgcaatggcacaatcttggcccacagcaacctccgccccccaccaggttcaagtgattctcctgcctcagactcctgagtagctgggattacaggcatgcaccaccacgcccagctaattttgtatttttagtagaggtggggtttctccatgttggtcagggtggtctcaaactcccgacctcaggtgatccgcccgcctcagcctcccaaagtgctaggattacaggcgtgaaccaccgcacccagccaacacctttactttttatggcctggatataatgggctaaaacatatataatgacaatgcttaaaagacttagatgaattctaagtctggaaaaaaaagtactttttacaaaaggagcaaaaatagcattcaggagagtttgaggaattgagaaagaccaaacaaacaaaaatcacctatgatctcatcatccaagcacaaacactttcatgtttgctgtttgtttctgctctttgtccatttatgtatttaagtttggctatggttgcaacatgtaattttctatactttaaaaaatttggggctgggcacagtcgctcacgcctgtaatcccagcaccttgggaggccgaggcgggcggatcacctgaggtggggagttcaagaccagcttgaccaacatggagaaaccccgtctctactaaaaatacaaaattagctgggcatggtggtgcatgcctataatcccagctactcaggaggctgaagcaggataatggcttgaacccaggaggcggaggttgcagtgagccgagacagcaccattgcactccagcctgggtgacaagagcgaaactccatctcaaaaaaaaaaaaaaaaattgtcatctaccataagctcacacttatgttgctgacaagtgttcctaattatcacttttactggctgcataatattctactgagtggctgtgacaaaatttaattaactgttcccctattaatgtaagattaccgttgtttctggtttttttgccactttagttacaagcttttgtgctggatatcctccatttgaccctccagatccactctccagccttgtcctccctgctttgggtcctatgaagctgacttgtatggactgtatcaatgggctccattgctctctggcttttgattgggttcagccaatggggaccctggcaggagatcagaggatgggagaagagtattgctggggtatttattccccaggctctccgtctccagggtcactgctggctggataattctctcaactaaaggtcacagctcttgttgaatgaccctttccacatggctccatctgcctgtgggttccagtaactgctctctccagtccccttttcatgtctgggtgcctacgtgtcccctcaccccctgcaacacacacacacatgtgcaaacacacacacacacacacacacacctgttcctgctagcctttgggtactgcactattccttagagttccctacacctggcccacatctctacaaagagtctctttaattagtcctcaaattatacagttcagtgtcctaactgatatatcatgctatttcagataatgcatgtctttttacatctaatttcattaggatggatacctgaaaagggaattatggagtcaaagaatgtgaacacttcaggctcttgagtcatactgtcaatttgcttttgaaaaggatctgttggcattggtaccagtgcatccttccagcactggatattttaaaatataattttgctaagtcaataggttaaaaaatggtactttatggtaatttaagttttcatatcttggattaccctcaagtttgcttataaaacctggttattgctgtgtacgttgttattttggagtttgtttaaatgtttctcccttccccactcattctctagttgtataatctttccttaataattcaattttttaaaagatcaactttttaaagcctcaatgtcttcatctatttacagatatcctaacaataacacctctctcacagaattattgtgagaattaaatgaaaataagcatgtagcatataagaaacatccaagaaacatgaatgctttcctccttaataattatgcatggagtttaattaacaaattatgtctattttttaaaaaaattgtgtcagttttctttcaagtttatattgaaacttacttcataaaataatattatagatgagcagaacaattcagtattatccagatttgtttttatatattatgtgactttagaaaatttgtaacccttttaagccaaaatctttaaaaactatttattttattttattttattttattattttattttattttgagacagggtctcactctgtctcccaggctggagtgcagtggtacaatcatggctcactgtagccttgacctcccaggctcaagtgattctcccacctcagcttcctgagtagctgggactataggcacatatcaccatgcatgtgttacctcaggtctggtttctattatacagatcaagtaatgctttggcaggctacacatctattatctatttaattctttttttgtgtgtgtgtgtgacggagtttcactcttgttgcccaggctggagtgcaatggcacaatctcagctcactgcaacctccgcctcccgggttcaagcgattctcctgcctcagcctcctgagtagctaggattacaggcatgtgccaccatacaaaaataattttgtatttttagtagaggcggggtttctccatgttggtcaggctggtcttgaactcccaaccttgggtgatccacccacctcagcctcccaaagtgctgggatttcaagcatgagccaccacgcccggcccacatctatttaattcttagagccaaccaccaccaaagattattcctgctggtaaaaaatgctgatcgctactctgggatctcatcatctacattgagatcaggcagattttcccaccacatccttggcctatagaaagcagctgcctgaacatgttcaagggtgctggggcttctcccattaaagcatttttcaatgctttagagaagaaactattccttaggctctttcaggaccaagtgtggtgagggaagaggcacagttacatataataaatcactcctttatttctatctccttagagattctaatggcttaggccattagaatccttcctatacattattccagagaaattctggcaactcaacaccattaaatgtaacctaccagtgagtccaaatttcagccaatcaactaagcaaatagtgccattcacagctgctctagctaatacatttgtttcagctagcttttgttgtataacaaactatccaaaacttagtgacttaaaacaactgtttatgtttttatgattttataggataacaatttgggctgggctcagtggaggcaactcatttgtgctctacgtggtgtcagtgggatcattcatgcatttgcagtcagttggcagtttggctgccagatggctggtctcagatggcttcattcatatcttcctattggtgctggctgttggtaaaaccacgtatcttcagtaggttagtccaggcatcttcaacatagagtctaatccaaaaacagcaaaaaagaaagaaaaccccaatgtgcaagtgctttccaagtctctgtttgtatcacatttgctaataatgttccattatccaaagcaagcacataaccatgccaaaaatcaatgtgtaaaggaattacatgaaggcgtgataccactactgtaatcatctacaacattaagtccaaaactatctggaaagtgtagtatatcaggactaccttaatttggccccagttcaatgttatcttctgtgctcctgggtctaatacctttagaattcatccccatacatactagcctggtttcctctaatgttaagttaacaaaatcttatgattcttttgaagtataagacttttcctgctgagctagactctgctcttcccacctccgtatattccgggaactgactctaaataaaggccatgagagttgggagcactggggctgagaaagaatagggatctcccttgcaaggcaagtgcctcatatgggcttattacaggctttcaaacaaggaaaggctaatatcattagacaagaaatgagaggcttcttccactatcaagggaaactcagggatgcttgggggtttcaacattctcagtttcatccaaatccaccaaaatgtccccattcctagtctcagagtcctactcctttcaaattactgagaaaactttcacatatgagacttagccagtctgtgaatgattgatttgggttgaatttttcagtcatgtctttcatgtctagtgattcctgtaattagaaggaataagaggtactttcagggcagtcttagaagccctctggtgctctgaatatgatttgaggtgaaagccctaaacttgttagtttcttcctgtaagcaccctggtgcaatcagaagcagccatcccacattacattccttataatcatctttactaccataatggttaaatgcaacagctacttggcctccagaaacttgcctttcattggtattcaaccctagcaagaacagatgataatttaatcaaccatgatgtcaatgcatgccatagattactagtggcaaagagttcagctctcaattcaaaccaatccaacactaacaacaaatcaaatcaatcccagaatgtcagaatttgagaatctgtttcctatgaccacacctagtatcaagtgctagtatcagccagagtccagtcataaaaatagagtgtatttaatattaggaacttgtaataaagatataagaagactgaaagagcaaaaaagtggatgccaaatattagaactacagacagcagctacctttctactacctattgctacaggcatgacacattcaggaactagaaacaggaaataattccccctcccaccttccagtccccaaggccttcccatttactgaacttaacaggaagctagctggcaagggaggctggcaaatgaagtttgtcaaaattccagccctggcacatcagagcagaggagaggaggatggacttagagttgagaacaggaggtacataaccaactcactcctcaatcaaaatctatctggatgaagtggagacatatccattaagagataaaaaataaagagactataaattccaattagattgtagcacaaggaattgtcttaaactctgtggcatctgaccctgtaacaagggcccaatgtatatttgttgattggttttatgagaaaaataaaaattgggcatctgctttgaccatgagcataggacaaaataaacttatttatttatttatttatttatttatttatttatttatttatttatttttgagacggagtctcactctgtcgcccaggctggagtgcagtggcaagatctcggctcactactagctccgcctcccaggttcatgccattctcccgcctcagcctcccaagtagctaggactacaggtgtgcgccgccatgcccggctaattttttgtatttttagtagagacggggtttcaccgtgttagccaggatggtctcaatctcctgacctcgtgatctgcccacctcagcctcccaaagtgctgggattacaggcgtgagccaccgcacccgggcctttaagtacattttgtagaagttgtatcaaaattcattggctgcaaatgagagaaaacctgatgcaaactggcttaaatttttaaaagataatgtgttggcttatgtaactgagcagccaaatgtgcaactgggtatagggggtctaacaaatgtcttcaggattcaaattgtctctatcatttcttcactctgtttcctttttgttgatgccattctcagacaagatatctcctcataattacaagatggatgccaatgattattaaacctttcagattcaaatattttacaagaaaaaaaagccagagtatttttctcagcattctcagcaaaatcctgagatttacagtggaaaacttatgtgctgtgccctctccagaaccagtcactgaaagaaagagtatgtaagtgatatcttacatctggagctccacccagaccacatgaactgaaagtggagagtgaatcaaagtgacatcttttgtgctaagatgttgcaattgcccaaatgcatctgtggacttctactagaaggtatagcagaaggtgttaggtgtctattataagaaaaatatcactatcatataacacccctgggggacatatttctaaattt

SEQ ID NO: 1623 - DNA, 1223 bp, Homo sapiens
gcaaaccttaagctgaatgaacaacttttcttctcttgaatatatcttaacgccaaattttgagtgcttttttgttacccatcctcatatgtcccagctggaaagaatcctgggttggagctactgcatgttgattgttttgtttttccttttggctgttcattttggtggctactataaggaaatctaacacaaacagcaactgttttttgttgtttacttttgcatctttacttgtggagctgtggcaagtcctcatatcaaatacagaacatgatcttcctcctgctaatgttgagcctggaattgcagcttcaccagatagcagctttattcacagtgacagtccctaaggaactgtacataatagagcatggcagcaatgtgaccctggaatgcaactttgacactggaagtcatgtgaaccttggagcaataacagccagtttgcaaaaggtggaaaatgatacatccccacaccgtgaaagagccactttgctggaggagcagctgcccctagggaaggcctcgttccacatacctcaagtccaagtgagggacgaaggacagtaccaatgcataatcatctatggggtcgcctgggactacaagtacctgactctgaaagtcaaagcttcctacaggaaaataaacactcacatcctaaaggttccagaaacagatgaggtagagctcacctgccaggctacaggttatcctctggcagaagtatcctggccaaacgtcagcgttcctgccaacaccagccactccaggacccctgaaggcctctaccaggtcaccagtgttctgcgcctaaagccaccccctggcagaaacttcagctgtgtgttctggaatactcacgtgagggaacttactttggccagcattgaccttcaaagtcagatggaacccaggacccatccaacttggctgcttcacattttcatcccctcctgcatcattgctttcattttcatagccacagtgatagccctaagaaaacaactctgtcaaaagctgtattcttcaaaagacacaacaaaaagacctgtcaccacaacaaagagggaagtgaacagtgctatctgaacctgtggtcttgggagccagggtgacctgatatgacatctaaagaagcttctggactctgaacaagaattcggtggcctgcagagcttgccatttgcacttttcaaatgcctttggatgacccagca

SEQ ID NO: 1624 - DNA, 822 bp, Homo sapiens
atgatcttcctcctgctaatgttgagcctggaattgcagcttcaccagatagcagctttattcacagtgacagtccctaaggaactgtacataatagagcatggcagcaatgtgaccctggaatgcaactttgacactggaagtcatgtgaaccttggagcaataacagccagtttgcaaaaggtggaaaatgatacatccccacaccgtgaaagagccactttgctggaggagcagctgcccctagggaaggcctcgttccacatacctcaagtccaagtgagggacgaaggacagtaccaatgcataatcatctatggggtcgcctgggactacaagtacctgactctgaaagtcaaagcttcctacaggaaaataaacactcacatcctaaaggttccagaaacagatgaggtagagctcacctgccaggctacaggttatcctctggcagaagtatcctggccaaacgtcagcgttcctgccaacaccagccactccaggacccctgaaggcctctaccaggtcaccagtgttctgcgcctaaagccaccccctggcagaaacttcagctgtgtgttctggaatactcacgtgagggaacttactttggccagcattgaccttcaaagtcagatggaacccaggacccatccaacttggctgcttcacattttcatcccctcctgcatcattgctttcattttcatagccacagtgatagccctaagaaaacaactctgtcaaaagctgtattcttcaaaagacacaacaaaaagacctgtcaccacaacaaagagggaagtgaacagtgctatctga

SEQ ID NO: 1625 - DNA, 90442 bp, Mus musculus
catctcacacagtgacttataatatgttcagattattatgggattactcgtacataaccctgccagaagttcagatgcccctgcacagggcactacactccaatgaaggaattggggctcctcagtctatcactgggggaggaaatataaaagataaaaccagagggcttgtagttaaaagaaaaatagaaatctcacgaggtgaagaattagtcaaaggagactaggaaccaactgatagaaatataaaagttaaagctggaacagttcagtaataaaatcaacagggcgctattggattaaagtgaaagcataaaacagagattccccaatccacactgatcaattagtgtgcacactgatcaactagtttgtgatgagttaggaactggagagagggagggggagggtctcacacagaacaatcccggctaactgattagttggaggactatgccccgcttgttggtgtggagtgtgcacagcgtggaggaggatggtgttaccatgaggaacctggtagatccttcccatcaggtgtctaggtctgccctaagctatattgacaagagagattcctggcacaatgtgatggaaatggaacttggtctctgcctccttccactccacagtccatgacctcgatcagatcggtgaatgtggaatattgaatttattgctgtgtagccaaggctatcctcaaatgggtgatatttctgcctaagcctcacaagtgctggggctaggaggtatctgctaccacacctggagacttacactattctcaatttatgataggacaggattaaccagtggcttctgttcattgtcatactgaataactcaaaagggctatcagaagggcttgttgttccatgacacagatataaaacaggctagattggcagctagcatagaccatattagcacactagctaaagaacctttcaaaggactggaattctgtggactatgctccctcacagcagtggaatgaaatggggaagtttatggaaaaagcacagcaagatctctaatgcttgcaaattaaccagcatattgctatatagcgcatgggttcaagaagaaaccatgccaaagacactgggaaatacttggaatgagaagatagggagaatcatgagatgtgtataagggtaaaataaaattggaaagttggagtcattagaagaacaaaccgtcagctatgaggattgtctaatattgtgagacccctgccactgacatcagccagtctgctagggcctttctgcatgccgtctagtttaatctgcaacagcttaagttaaatgaacacatccattaaaaatttaacttgccatccgggtagcggtggtgcattcctttaatcccaggacttgggaggcagaggcaggcagatttctaagtttgaggacagcctggtctacagagtgagttccaggacagccagggatacacagagaaaccctgtctcaaaaaaaagaaagaaagaaagaaagaaagaaagaaagaaagaaagaagaaaaattgacattgccacatgaaaggaagttaaagtgagacagtatggagcgatggctcagtggttaagagcactggctgcccttccagaggtcctgagttctattcccagcaaccacatggtggctcacaaccatctataataggatctaatgccctcttctggcatgtgaatgtatatgcaaaataaataaataaataaataaataaataaataaataaataaataaagtgacagtgtggtagaggtgcaaaatgcaatctgtattttaaattaaaacagtcctgcacagagatgacagggttaaccagttttatccagttggcatacattctgaagaattacagaagggctgtctgcttgtctttccatagtacatatataaaacagactagattgtttcagggtcagatagctgtgctgggaattttcagtgctaatcttgcataaatcctttcagaaaatagagaaagaggaaataactccaaagtcgttctgcaaggccagctactccttgtgacaaaatatgacatttccttatatttttataggaaaggaaaattttagacacatctgtctcataaatataaatagaaaagttgtatgtaaaatatttacaaatcaaactaaataaaaggttaacatgtgcaagtgtgtgtatgtgtgtgtgtgtttgtgtgtgtgtgtgtgtgtgtgtgtgtgagagagagagagagagagagagagagagagagcttatctgcatgtccactatgtacttgcaggtgtgtccaaggccacgagagggcatcagttacaagtgacagagctgccccatgtgtgtgctgggaacctgacccaggtccttggcaagctccactaacctctgagcatctgttcagccccatcaattttttctaaggattgttttaaacaatctttcaatgtaacttaccacattaacctatcaggggagaaaaaacaaaaacaaaaaataaaacaaaacaaaaaaacaaaatcaactcgagacacagaaacatcgtgagacaaaaattcagcagtttttcatagcatacaggaacagaaaggagcgtcccccatctagtctcaagtatctagacaaacccttagagaactttgtattttaatgttccaatagcaaatgtgctctccctcccctgtctctggagttaaggaatgcaaagctactgtcagtgtttctgttgcagcactgtgctgaggactgtagccagtgctctagagaagaaaaagcatatgatttgagagaaaagcataaacgcactatcatttcgcacatggtgaatgatgatgaatgccggaaatcctaaaggattcaacgacaaactgttagaattttaaaaaagggcaaaccttcaggtgttgttttaaaaaggtgatgatgtgttgtttaaacatggtgacttccaaatcaattgtatttctataaacaagtaaaataaattggaaggcctttcatttgcagttgaactgttaaaatcgaatgctgaatgcttacgaataagtggtatacaccctggatactatgagtaccagctgggtagcagtaaaagtaaagattacatgtgtatcaactggaggacttgatactttgtcaccaaaccaaagatctaattctacatgcacagaaattcagagaagccagactgccaagcctcaccagacagtaaccctaaatttaaagctacagtgaggaggtagctttcctgcagctttggctaggagaatggggtcttagtgttacttttgctgggataaaacatgaggaccaaaagcaacttggggaggaaggagtttatttcatcttacatgttccaggtcatcaacccagggaagtcagggcaggaacctggaggcaggaactgatacagagactgtgaaggaaccacgtgaaggaatttactaacttactctactataggtttgctccgcccatttccttttatcattcagaatcaccaggtcgggggtagcaccacccacagagagctgattcttctatatcagttatcaatcaaaaaaatgtactacaggcttgcctacaggccaatcacatagaggcatttcctcaatggaaagtccctcttcccaaataactctagcttgtgtcaggttgacataaaactagccagcacaaacagagtaagatagactccaaatagactcacacatgtagagttggttgatatgtatgtgcggggcacatatatgaagtgggctgataatctgggaggggaatggcaggcatgtgtatggaggtcagaggacaatgttcaggagttggttctccattcctaccttcttttaagatgagggtattacggcgtggccctggctgggttggacacagcgatcctctgtttggactgaaggtgtgtactaccaacacatctagcttcagccttcctcctgatgatgcaggacctctgctttctctgttgctgtgttgctgcaggctggctggcctgcgagcttctggctgactctcctgcctctgatttccctctagccataggagagctggggttacatgggctccacgaatcaataggcattttcacacgctgagctgtctcccttgattgatttttggcaaaataaaattagtgaggagaggatagcctttaaatgcatgttcccaaactcattttttatgagatccacaaataccaaatattctagaaagttgtttacaactttcaaaaatgaaattaaccgtacatccacccatcactgagtaacctgaatcctgagctacaataggagaaagctaatatacacacatccatcaaaacccatgtgcctagcgcttatggtgtctgtttaaaggagccaggagttaggtacaacccaagtgtctacaagcagtaaaaggaatcaccatgtgttcatacaatggtatgttcatacaaatattatacagcaacaagaggaacatgtctgctattctcagtatggtggctgaatcccacacatatacaatgagcagaagaagcaaacctggaagtttatggactatatgatttccctatatgaagttcaagattggctgtagcaaaggctgcctctggggtatcagctgtataaaatgcaagtcttgagcctgcaattgctttgttgcacaattcagtgttgactgcatagtgatgttcaggatttgagagtgagactttacagttgcagttattatagcccaaattcctggtaagcatgaacagaaggaggatacctgttggtttgcagtttgaggggatccagttactgtggatgggagggttggaagcagagggctcaggtcctggttgtggctgcgggaatgtgaaaccgctcattcacatctcagtagatcaggaagcgaaaggagcatcctgcctagttgccacctcccttgtcctatttttattcaatccaggatcccactgggtttgtcccggcctcattcattaatcctctctggaaacccaaaggtgtgctccctggatgaccctaagtatttcttgacctgatcaaggtcacaaagtttaccattccatcggtacaaatggtgtgctcactaagcaagttggtagcagtaacaggagtatgtgtgtgctcagactctgctgacagcattacagatcaatggaaagttctggagagaaacttaaggaaaatcttaaaaaggtggtatggtttgaatatgcttggcctaggaagtggcactatttggaggtatggccctgttggagtaggtgtgccactgtgggcatgagctttaagaccttcatcctagcttcctagaaatcagtcttccactagcatccttcagatgaagatgtagaactctcagttctgcctgcaccatgtctgcctggacactggcatgctcccaccttgatgataatggactgaacctctgaaccgataagccatccccaattaaatgttgtcctttatgagacttgccttggtcatggtgtctgttcacagcagtaaaaccctaactaagacacaaggcattgatgatttccctagtaatttcattcctagaaaattttccctcagagcaaatgaggatattaccatgccattatttataatggcagaaattggcaacacccaaacacgtcacaataggctgtgcacagtgcagccatttaaaatcatcttagagctaaaaaagtgcttgtaaaaaaaaaagagttgtaaaaagggcttgaaaaggtgttcatggtgtgttgtgagacaaaagggtgcgttgaaaatgatccatacatactatactgtttgtctgcaacctttagaatgtttttacagcaagtcccaggaggcagagggaagtgactctccaatcacggggtcggaagaggggtcagatgctgcccagttatccaacctgcttcagtagctttaccgggggcatagcgcagttcttttgagctatcaccagaccaggctgaggggcagaacgagaactgtgagcagaacaaatcctttctctattaagctgcttttgccagggtaattcagcacagcaacaggaaaagataccaggacagaaattggtcccgggaactggggccgttgctggataagcctgctcgtgcgtttcttaggccactggaactgttctgtggctgaaacttacagaagaatcggaactttggaaccttgggctagaaaagctcttgaatactggacacagagattactgggcaattctgttgggagctgagaagacaagaaatgtggagtgtggggccagctcaaggggtttctgacaagacctctgtcaggaaccggtaagaggacatttgtgtgatgttttgtccacatagtctggcttcattctgacccagccctccacctcctagaacctgaatgaagttgaatgtaaaggtaccagactaacttgtttagcagaagaacttcaagccaggagagctttcagacccgggctggggaagcggctctaactgtagcagatattcgcactattgtggagaacctcttgatcctactgggagaaggatcctgaggacaaaaccatcagaagctctcttttgtgaagatgcactgactggattcccttctggaaaaaatgtttccctgggatcagcacacaggagtctatagagctgttggcacaaggcaggcaggcaggcaggcaggcttcatctcaagggggcagcagaactcagcagcagcatccatataatgctggctttgcgagtatggaaaaatacagggctgagggaggagctcatggaatcttgctgaatattttcagagagctgctaaggccaggtaatgtgtatggggtttgagtccctgcaaggaggccaatgtgaagcagggaccacagaatactggagatgccagaaccaagggacacacactgtgagagctgtgaacatggactggagccagcccaggagaaaacctgtgtgtgtgaaggcagtatagctgaatggctgatgctatcctagtcttttggagcccagctgattttgtcacaagctccggatgccagacatggagctcaggatttgatgttttcccctgtttgattttggttttgtttttgggagaagagggtatcagatcctctggaagtagaattataggtggttacgagtcattggacagggtgctgggaaccaaggccagattctctacaaaagcagaaagtgctcataactgctcccaccctctcaccagcccatggactcccagcttttttttttttaagttctactactttaacagtcagcactttagtgttcacccttatgtactgtctgaatgtggtaacaggcacataagttaccattgtgtagagtttgtttggtgagtcctcctcctcgctacatctatttatttttttgtacaaatgtacacagataagataagaaacattccttatccccttggtccagatgtttttattgaacctcatttcaatgtgcacatctggaatccccatcctcatggcaaatttctggatttggatacccagggagcacacctcttgaagcccacatgggtgcacttgtagattttgatctttgggtcactacctcattgatggcagaatggctcttgtcttagtcaggggttctattcctgcacaaaacatcatgaccaagaagcaagttggggaggaaagggtttattcagcttatacttccacattgctgttcatcaccaaaggaagtcaggactggaactcacacaaggcaggagttgatgcagaggccatggaggggtgctgcttactggcttgcttcccctagttttctcagcttgctttcttatagaacccatgaccaccagcccagggacggcaccacccacaatgggctgggccctccttccttgatcactaattgagaaaatgccttacagctggatctcatggaggcacttcctcaagggaggctcctttctctgtgatgactccagctgtgtcaagttgacacagaaccagctggtacagcccttctttttgccaccattctttgtgggagccatcctgccaggttcaagttggaaaaaaggatgagactctagacttttaaagtgttcaaattgttaaagactatggagacttttaaaattggactggggagggggtgctagagagatggcttagtgcttaagggcactgattgctcttctggaggacctgggttcaaatcccagcacccacaccgcagctcagaactgtctacaactccaagatctgacactctcacatagacacccatgcagacataacaccaatgcccatacaataaaggtcaatagatttttttaaaagaacatttgaagttggactgggtgtattttaaagtataacaatgtcatgagactttgaggaagggtgtagaagtttatggcgtgaatccatgtttgggcatcaggttgacaagaaaaggaactaaatatgcctgtggggtattatcttgcttatatgaattgatgtaggaaacccatcttgatcactgctgaggccgttcctggactgtgtaagacagggaaagcaggctgagtactagcatgtatctatccctccccctctctggattcggtgagacccaactccttcaagctccctccgttctcccttctagccactgtggattgtggctaaaatctcaagcttcaataagccctttctccctcatgtcacttctttacagactatttcctcatggcaacagaaaagaagctatgatcccatggcagtgaggcgagctcttgccaacacaaatcagagcctttgtctctcagctctggggctcatcggctcctgctcttcacacagatctcactggggaggctgggcttggaccccactgccaccttcctcatctttgccacttcctcccatactgtgtcctccttcctgccacagtgtcttcacaggggctgtgtgccctgcagagactctgccgttcttctcttggcaagactgatgtgtgcacctagcacatcccccatgccccaaagtgtcacctcctcagagagcttgtccccggtctaaaaatagtcatcagtgcttgggccccccacccccacctcccacctgaaccctgttgcctctccttgcttgtcacacagtagaaatccattgaccatggttcctccagagggaagaggctgtcttttgcattgctcaatggaatggatccttaggggacacttggggtgttgagttggggatgtggtttgtgctcctggggacctagcaggagtcaggcgagttgcctgtcagtagcttacagaagagcaagaggacctgaccctggccctttgatcttagcctttgccggcagctgtgtgagcaatcccttggtcttaagccagtccctctttccttccaagagagagatccctcagctgttgggcaagtgggcaagagtggaaccatgcctggccaggaagatggcccatgggatccgggtcacttcagcaattcttccaaaagcagagtcattggaaagatttatgtcttgccattaacaaagggagacattttttttttttttttttttttttttttaatgaaaggcagagaagcaaggcttggccagtaggattagacatggggaaacagaaatgagaaggaaacaactgccaatgctgttgggaatgaatttggaatttggctctgagcttcctggcagcccaagtaaaaagggaagcctgatcggttacagagttcctctcattagcaaggaagacgcctgctggttcctcgggggagatgtaatttgttccagttttagattttccaggcaataaatcctgagtcaaatttctcccttgaggatgtgagagatatcatcaattgatgggataaataatatgcttgtcttatagtaagtatcaaaaagactctccagggacctgggggcacccaccatgcagctcactgggtgacagttttgtttgggtattcttatttttaaattttactagtatttatttatttatttatttatttatttatttatttatttatttataagacaaggtctctctctgtagcactggctttcctggatggatatctaactattcatggatctcacatggagttttcctcctgaagagctaagactattcataagtcacatctcgatgacttcatggggacaattttgcaaggagaggcaagagaggaacctggcttcctctcacaacacactggtaaactctgtgtgtgcagtatttgtggaagaaagcagcagaaatccatagttgctttgtgggaaagggcagctaactggaagtggcagagaagacattgtctgatggagggaggcaggctggcttgggtctccccgtgcccccaactagctgtgtgatttgtggcatgttgaacatctctgagcatgttgcctcttggtaaaaaagccatacttgctttggaagactggaagggaaacgggttagtggcaaagcatgggatgtgtgtgcgtggatgccatgcacctactgactttagctcccatcctgaggtcctcagggaattccagggagcaccctctcacccacatttctgggattccggcccaacttagtgagaggcaagcttgagacacacactgaccttgccttggccacatgtctctaggggggtcccacgagccctgccaaatggttcagaccggaggaaactagtctccaaggtctgctcatcctccgggccattggccatacccttcttttcctgtgcctctttgtggtctgtctcagtttcttcgtcccacccactctctgcagcaggcactagtcactgcaggccctgtgccaacccctgggcacttgggtcttcactgtttgccttcctggcatgtggtcctgtggattcctggcccacccctgatgttgtttcatgtatggtctcttcccctcataagggacaagtggctaattcctcagcctctcttcctgagcctgccctctcccaggtgttagttagaacttgaggtagtcctacagacttctgactgggctggagccacaatgggatacacagatccaggtcttcatccatatcccacacacgacccggtgcttcagaaagctacactgtggacacacagcaagcacctagccatttccatagcattacagctgcttctgggctctttacatacaccctcagggctcaccctagagctggcagctggacctttacagctttgcaagaagaggaaacagggtcatagctacagacactcaaggtcatactgcaagtgacagacaagggagccgaagaagcgtttatgttaccaaggtcaagagaaataagagaagttgcctcctgtcccagcccccatcaggtctcctaagcaaagcatcctcaggagtacttgaccttggaaagccctctgggatcgccctggtggaagctcctttccctgggtaatcggctcccctgaggtgacaccttcttgggactatctggaccttcctggactacctggcactgggcaggccttccaagatctcttactcaggtagaatcctttttggcaacttccagcctaaggtgaggccctccttcggccagggaacccaccctgcagcagcctccccttggggtcattacaaagaagggcttggggtagggttgttctggttccctctgaccactcacacttcctttaaacaccccagccttactacatcccttcactatctttcttgctgggtgccattttgcagatggatacaatgaggcactaggcaagttaagttaggacacagtcccgttccagctttgtattcagatttggtactgtactttgatctgaacagcaagtgacactcaccctttagtccccacgtaaatagttaatttttctcacaggccccagggcccttttcccttggtgttctatgggacgcatgttacccaacttcagttgatacttccaaacggctgagcaaccaaagggttaaaggggcccggaagaggaccctgtaagggttaaaattataaacgcatttatcgccctctgactatttattgggttgtagaccgacaacgtcgaagccgggcagagccaggaggcaccctcggatgggcttgcgcaaacgccacaactttctagcacgacccccagaaagtatcccaggcacaaagttggcgcagcccgctcctcctccgcagcgtcgccctccccgtggggcgcgcggcggggtacgcgcgagctcccgcgcggggccggctcgggggacgcggggctcagcgaggctcggctccggccccctgaattggggggtccgcgtctgccccaaacgccgctttcttccgttttccatgtcatttcctgtactaataagatggtggtcaaagcaggggaggagagcagcagcggagtcgccgccgcgctgccgctggcgctgaaagtggccaccgtggccatgaacgtgaacatggcttcggaagacgatgggcggctcgccaaccggcgcgggggccgcggcgaagagcgcgcggggacactggggagcgggggcgcaggcaggcgacggggcacggaccggagcaccggaagcggggcgggtctcaaggtggcccgggcccgcaggtcgtcgccaccgcccgacgcgggcctcgggcggcccagcctccgcctccttcctccgcgcactcgcccgccttgttccactgtagccttttcctcggctccgccgcgcgctgacggacgcggccgccggccaatgggagcggctgttcgggcccggcgttcgcaaagagagcgcgtagacagggggcagggcggggcgagggcgggatgcagccgctggcctagttgcagggacccggtcgccggtgcttcggggccgggctggggggcttagggaccgcatgcctctctgtgacctgccgcgggcctggggcggcagagggagggcgtgccttttatctattttaagtcttggttgcagcacggactcttcgggaattcgcccctgagtgtcgtctccaccccccacctcctcattcccggtccccaaggtactatgtgatgcagaaactgcagaaacttggtggccaatgaccttcctctgtcaaggccagcgtgccctaggcaagtcgctgcagggactactgagcagccttgggctaataaggcaaaaagttgctagtgtcttgagcccatctgagttggagctcagacccttagaatcagttgatgacctagagaaggaaagtctgtcttttgttttttttgaccatggcttcgtgtggaggacagccgtggtttgtgattaagagtgatcagaaagaagcacgcccagtcctttgtgcgtggggactgcgagcagtgaagggagccttcttttcatcttgagaaccctataaactttgggagttttgtctatctgaagcagaatagttttccatgaagtgtgattcccgtggcacccctgtcccccgaagaggaaggcagggactttcctaggtcttggttgatggtgtagggtgtatgggtcagaagtcccatatccccctcatccctggggagcggagtatggtctctgctgggaaccttctgggcatatggcccagaccccctggtttatttagtttcttggaaaggacatcttcaggatccttcccacggggctttggattttgcagggctgtagttgatctcttcaaggggattctccttccctgcagtgggtccagtacagcctgtgtgggagtcagctgggagagcattgagataggatcaattaagtacctggcccagggtcagactcctggtttcagaatctagagctgtgatcctgggcgatgctctgtgaaccattttgggaatcacgattgccagaccccagcctgctccacccagcccctaactgacagtgcccctaaggagcagatgctctcagggtgtggtaccttctgagtatccgtctcaaaaatgaggaacacttgtcccaggggcccttgatctgtcatcacggccatcacccccagcctggagctttctggtccaaatgtttcttaggttggttctccgaggtgtctgatgagagtccttcatctggcttactcttcacttagattcaatgtgggattatcagaaagcctgaaagaggcaaagactattggaagaggaattggggggttggagttatgctgcctttgtggtctctcacttggctttcctccataagcttcctccagggttgatctcagtgtgtccctgcctgcctcatccagtcagtccacccatctgcaagcccagggagctctctttagtgaatccaacccatcctggcttcctaatttctccccactagcacactggggaacagtacttcctgttcccaggacaactgctagggtctgagataaggcacctgctcttgccctgttccccgtagtacaattggggtcacctcagtctccctagttcctgctcccgctccccctccagtctgcctggtgcacttctgataaaggatcaaattgttgctaactgtaaagcctataacatgactctcccttatcttcagcctcatctcctgcccttctcacctctctgttgcccagcccagcccagcctgccctggccagcctctcttggatcctgacctaggatttatgaatgaatgaaagacagtgaggggcagagtggtgtggaaatgtctgctggcctttactttttgtttttgtttttagatttattatgtgagcacacaatcactcaacaccggaagagggcatgggatcccattacagatggttgtgagccaccatgtggttgctagaaattgaactcaggacctctggaagagcagtcagtactcttaacctctgagccatctctccagcccctgtatctggtggtctttattgccctcctaaaaatatttccagcagctccaggtataccacagggttgccttcagtcctcttattctaggtcaaggccatgtgactagctggtgagtctgggacatgagttgattgtggctcaaagcagttagctgtcaatgcaagactctcctaagatctccttcttggtggtgtggcatctgatagcagaattggaactgcttctgtgtcattccatgagcagtgtaccttggtgctccaccataaatgtgcagtacaactgagggatagacctttgttgtttgaaaccactgagacccaggttggcttattcttacaggatagcttatgtcacctcctccaggaagcctttctgggttaggctaaacttgggttacaggtgtttctggtctcatcctcgtctccttggattcctgttgttacttagtgatgatctttcatcgtcaccagaccatgggtcctgttttaggtaagaggcttgtgtctgagagctgctgggtgaatgccctctgtgagtacttggccctgactgaggacaggcagtgtgctccgagcctccctgagctgcagttccagcaggaaggtttcagatgcagcagtaagtcactggtcgagggcagatgcaaagctcttggtctttgcaggtgtctggacccagtggcactgagctccagagaactatgataggcaattccaggagagatagaggatgagatgggaggccccgagatctctgctgacataaggggtgattcagtgcaagggtgggaaaggaatggtggtgatatcagctagtgtccccgagggcttatacctgtcaggcactaagcagctctgtcctgtataagtcagtttctcaagactgtgtatcacctgaggccgtttactgtctgaggcaagggcattcatttagctaacagttttggaatctgaaggtccaaacagcatggccccagctccagggagatgtctttggagtgtttcattgtgctggatagcacagtggaggggcatgtgacaggggagatcacatggtaagacaacaaaagagagagagagagagagagagagagagagagagaaagagagagagagagagagagagagagagagagagagaaagagaaacccagggacctcctaataggccccatgtcttcaaatcctgcctctttaaacatgtgaaccattatcactagggtacactcaagtgctagccactccatactacatccctgttctggagatacccacaagtgttttacagatcgggaaactgaggctctgagaggtggggtgagaggtatagagcttatggcacagtcaggatcagaaagtgggatgtcacctgaaagcagccacttggagcaaaggcagaggaccctgggagctccctggatagggtccatacacacacagacacacacacacacagacacacacacacacacacacacacacacacacacacacacacacggagacaggggaggggggaggcatcaatgtggagaagggacctgtggccagccttggagaggcagtggctggtgagtgtgtgtgggtgtgagagggtggaaagggtatatcatagagcaatctctatgaaagtgtcgtgtggggtgagtgaccgttctggacacccctctaatatagacttttgagcagaggagtgcctggcccaggagtacctgggagtggggcttgagggaatgaagctggctggtaatctccacctctggctggagcctgcaagtccttggaggccccagagcctcatgttctcagagtggggccagggagggaggggcttctcggcagctggcccaggggccatggcggaaaaacaagccgtgcagaaagaaaaaaaaagccagaagaaaaaaaatgtgtgttgttatttttaaaaagcctatttcctattgcagatttgtatctgctgataccaagggggctgatgttcacacgcacagtgtacctacactagtgatatccctcagcccagcaccccaaaaaaggattgcaggaggggaagcctgggcctgggtgtcatcctgccctttgttcctacctgaagcttatatattcttgccgtgctaggcttggggccacccagcccttgtcttacacaactcataggcccgcgctcagctaggcaccaggaaaggtggtcatagggttacagttgatggggaaggggagagctgtcaatcccactcaaggagcagtctcctcagtggaggacaccttcaggatgggctttgaaggatgggctggacgcagaggaagagagagaaagaagagaggcgtctgagtgggtcagggctggcgggcagccttggaaagatggtctgtggttggtgagtgttggtgcaggagggtgggatggatatcagagcacagtgtcctggtcctgcccttgggcatgggctccctagagtactgctcccagttggctctggactggctctgtcttcagcagcagggctgccaaaactactgccttctgggacactttcctgtttagaattgcagcccgcacgattccctgtctcagcttcctgctttctctctttatgacagatcttacgccttccttacatgttttgtctttctctccctcgctgttcttagccctgtatctggcacttggtttacccctgtgaacagtgtagggttttagtgattgtggcctggaagctgtgtgaagttgtgaacgaatggggagcgttcacccttcacaacctgcgtataagggtaaaataaaattggaaagttggagtcattagaagaacaaaccgtcagctatgcggattgtctaatattgtgagacccctgccactgacatcagccagtcatactccagggctctgctagggcctttctgcatgccgtctagtttaatctgcaacagcttaagttaaatgaacacatccattgaaaatttaacttgccagccaggcagtggttgtgcattcttttaatcccagcacttgggaggcagaggcaagcagatttcgaagttcaaggccagcctggtctacagagtgagttccaggacagccagggctacacagagaaaccctgtctcaaaaaaaaaaaaaaaagaaagaaaaaaaagtgtttccccagcctagggtttgagacaccgaggctcagcaaggggaagagacttcactgttggtaaactgtgcagctgggacttgaagctgggtcacctggctcctgccttacctaacccccagttgccagctaggctggagtagctgtgctggccaagaaggagtttgtgcactggtgggctgcagggagcccctgagggattttatgagacaccgtgaccagatccttggtcaagagtgcacaggctgcatagaagtggttgcagaagtgatagagaatgaggaggaagccagcagaagagatgattacaggttggagtggacaggtaaaggctcagctcaggtgggcagagaatcctagtgttcgttgtttggttcgggaggacttggatctggggcccggcagggagtgggaagttgggaagggaccaggttggtggggttggcattgtgtcctgcagaggacctgtgccaccttcctctgtgaaccagggaagcgtgtcctgggcatggacacaatcttgtattctttaccaaggacaacatacctgaaaagagatggacagaggccacaccctcgggcactcattccacacactgaatgctgcttgaggcctgtctggctccagtgtcctctggccacagagataagggtgtcagtcccgcctcatattctgtggaaaaaaatccctttatattgttggtaccaaattgaagtcactgctccccaggaggggtcggctgctggaaggaacatgttttaagtaccatggtccttgacaacagtgcttttcacatccatttatggaacctgggctcagagaggttgattgagcagctgaagggcacacagcttagactctttccagtcaccccgtgaaagctacatcacaaaggagggctttatgtcttatctaataattcccagcaggcgactttggcgctttaaaaacgatttgataggtagggtcttggcacagatgttgtcaggacctttttccaccctgggaacctcagagtcagaacatggagtcacagttggctagacccagagtctcagatgaagtgatgatgggggaggggagcagacatgggcagctggcattctgcctcctggcatcagcttcagagtagagtagcagtggagggctgggttctatctttcaatgagacacctgaacctctggagctctctgtggcctgtggaattttccctcccctctgacacagaaggaaacccagcattctcttccaggttctgccttttctcaaaacatttatccaaagtcccaaggcaggctggctaccccacaggacaccccattgtgccattgaagaaactagtgtcttagtcaggggttctattcctgcacaaaacatcatgatcaagaagcaagttggggaggaaagggtttattcagctgacacttccacattgctgttcatcaccagaggaagccaggactggaactcaagcaggtcaggaagcaggagctgatgcagaggccgtggagggatgttacttactggcttgcttcccctggcttgctcagcttgttttcttatagaacccaagactaccagcccaggaatggcaccacccacaagggatcctcccccccttgatcactaattgagaaaatgccccacagctggatctcatggaagcatttcctcaactgaagctcctttctctgtgataactccagcctgtgtgtcaagttgacacacaaaaccacccagtacactgaggctcagagagcagaacagaccttataggaatcatttgctttcgagaggccagactccaaatccagccttcctctgtgcccaaggttctccctcctggatgtatttgtagtaaccagtgtccatactcaggaaagggttgttagtgaacacaggagagcaggctacgggtggtatatggtgtgacttaaccttgagctgagctggtgtggtcatatctgagaaggtagatgtggagacaccccccacccccaccccacatacaatcccagagctcccagtctgttatctccccctttctagaactttcctagagggaaaggatgagggctaagaaagggtcccgctgccagcttccctcggtgatggagtggctggcttggggtacaaaagaggctgagtagaccctcagttcctcagcgagggggcctgttatgagagagcttgtcatatggcagcacatgggaccgagctacagtagacccagcattgtcattgtctgcgatagggtgtgacctggagggtggggagctattgatttgacctggctcagacctcacaaccccagcagagtcagggtgactggtcttgtatgtgtccctgtatatctgtgtgcctgtaaagcccctgtgcagactagcagggttccaggaagcaagtcagagaagccagggaggttgatgtttgccaagggttcagtgtcccagccagaaggtgtgatgaagagcgagaagccccttacctcaggaaagggaagagacttgtgacttagtgcatgagagaacaggactaatccctcccaagaaatactgagccccagtaccagccatgcctgcaggaggcacatgcgtgtgcacagccctgccagcctcagctgccccactgtgcccatgttattggatctggcttgtaaaggtgaaatggaagcccaaagaagaagtgacccagagtcacacagataggaaaggctgagccgagatcacccactctgggtcactgctggtggtggctgggttgaggatctttgcacggggtgactggtggctttcccgtttcacccctgagctgcagggtagtgaagcgaaaacatagaccatgaagaaccgtagcccaggccagtctggggcatggaggactcttggcacagtgcagctgcattgtggggtggttgggcctatctacctaacactttgccatcatatagttgaccagtattcccttggggtctgggaattcaagcacactgctggatggctctccttggaaggcaagggtgacagcagactggcccatgccacgctgggaatgctgggtggacctctgccctaggtgagcagctgcgagttactgttctgctacagatccatcaagggagtgagtgtcacaggacttggagaacaaactcaagaagctcttactgcaccgtgaggtccccctgccattttcactgtagtttgcaaacgcatccaagggccactgtttggaagctgaaacaaggtggttgaggtttgttgttgttttggggttttttgtttgttgttgtttttaatcacaggtagtttgagccattctggctcccatcctgactataagtgaaggcagggagtgtgaggattggcgttggcaatggggaagagagtgcaggttcacttcccagaggtaggggagcagctgagcacccctcaggaaaagcagaagtgtgtctggagaggggagggaagggcatttgggcactgagaacaggtatgtgtaggtaagcattgggaaggccagaaagccattgaatgacaagaggtcttggcatttgagagaggggaggggatgaccctagagactggaagaacttgcgtggagctactgaggaggtcttgatcattccttagtagaggtgagatgcagcgagcttttattttaggttgagaacttctgtccctgcagcaggaggcttggaacggttagaggagggacaagaccaccctggggtgcggtccttgtttttctcttgtctgggaggctgtccttgcactcagtggagtgagttgccagggaggagctatctgcccattctatggggcagtcctggggtggtgagccagcaaggcccctagggtgaggccacagccctcctaggctgatctggtcctgagcttgtggttgctggctgtgggtgaagcttcattcccccacctctaacactagagctgcagggtctgatctggagagcagccagtggagtggccaggttctttgcggcctggtggggctcgtgcacggaggagggaagctggggcttgttgtagagactggggttaccctggtttgtggcctaccatctggagagctggggtcagaagggacagtggcctgcagttgtttcccatgttgatttcctgatggccaggtctgaggccagcatttctgccacacctggaagctaggcccagcctgtgccacttcaagggagcacagcgtaccgtgacgaggttactccttcagctttctcctaggctcttttctgagcttgagggacccaccttgcccttggtttctgggaagaacccaaggtgtgcctgggcctgcatgtggccacaagcccaaggaggggggctgcccaggagggaactgtgagagcacccctcccactagcaccagcctctcccttctccttggggccccgttaagggtgcccctggctcactctctctgttaggctcccagaccagctgggtcctgcagcagccgcaggctgggcagctgctgttcaggggagtctgcgctcctgcagaatggggtggggcagggcaggccttcttcacctgacccagcttgggcttcaggccaaccagcctggagtcactgaggtgccttggtttcgacgtggctctggtcacactggaagagtggcgctctgtgtgtgtgtgtgagggggtgaggagcagatcctaggtcggtggtctcaggtttccccctgctgcctgcccaccctgaagctggcagcttccctggttaatgtcatgcaggactgcctaagtcctgtttctcaaaggacatccaaagcctgctcggcagggtcccccaatgtaatcctcttaggttgcacccaggagtcagggctcagtcaagggcttggtttgcctcaggcaccatttagtatgccccagtagcaactccccgctcctctcttgtctttgctttgattgttttgacacagggtccaaccatgtagtcctggttgctctgaaactctctagggtggccatcagggtggtctcaagtttacaaggatctgcctacctctgcctagaaagaaaggcacatgccaccacacccagcaagtctaactgtcttggagcccagtcattgcccatttattttcttggtgccttgggtctccctagagtgtggccgtgacagcgcgtgttactggaaccactgtttttcacagaggggtgagctgatcttaacttattcatagccagcctgggagttgtgccattgacccagttggcagatggactaactgaggctcccaagagttcagtgaagatggtagggtcttgtgtgggtacttgagggcagagctgaggctcaggtctactcctcctggctcttctgtctacactggagttggcttgaagtagtgatgtcatcagtatttgactattacacggtcctgacctggggtttagctgggttcggtctgtttggggttaggattcactggacagttaggacccttgcctgggtacagtgtcaccgtcaagtacttagcctatgaacacttcagatgtttgtctgcttttgcctctctccttttggaacttcacctttgaatcattcctttcagatgcaccctctatcctggaacaccccagaagctgggcaggagctaggcagcctctggtaaggaggctgaggtcactgtggaagcggggagggggccctgggtccctgcttccctaaccggctcggcagggacacccaatccagctgtccatggggcattagacttttctctgatgctcccagccttgttgtaggtgattgtattgctgtggggtgaggtgaaccaccatttcccaaggcagatctttgtgtcttttaaaatttgtggtgctgagttttaaccctataaaggtcatacaactatatatttgctgtaaaagtggaatgttgacaaataaggcgttccttagcagacggggcattcctgactcttccacaaggctagcatcacagtagccgtggtcctgcacagttctttctggattcagtcttgtagtgtgtaggacacagacagcgagagttgcctgtagtattgactattgggtacattaactttcaacattctacctagaaaaatctggcttttctgtagggtgtgtgtgtgtgtgtgtgtgtgtgcgtgcgtgtgtgtgtgtgtgtgtgtgtgtgcttgcacttgttgggtgtgtgtatacatgtgctggtgcatttatagaccagaggtcagcactggatattttcctcggtcactttccacgttgagatgcgtggctgccagggtctctctctctctctctctctctctccatggggcattatacttttctctgatctcccagccttgttgtaggtgattgtattgctgtggggtgaggtgaaccaccatttcccaaggcagatctttgtgtcttttaaaatttgtggtgctgagttttaaccctataaaggtcatacaactatatatttgctgtaaaagtggaatgttgacaaataaggcgttccttagcagacggggcattcctgactcttccacaaggctagcatcacagtagccgtggtcctgcacagttctttctggattcagtcttgtagtgtgtaggacacagacagcgagagttgcctgtagtattgactattgggtacattaactttcaacattctacctagaaaaatctggcttttctgtagggtgtgtgtgtgtgtgtgtgtgtgcgcgcgcgcgcgtgcgtgcgtgcgtgcatgcgtgtgtgcgtgcgtgcgtgcgtgtgtgtgtgtgtgtgtgtgtgtgtgtgtgtgtgtgtgtgcttgcacttgctgggtgtgtgtatacatgtgctggtgcatttatagaccagaggtcagtactggatattttcctcggtcactttccacgttgtgatgcgtggctgccagggtctctctctctctctctctctctctctctctctctctctctctctctctctctctctctctctcctaacctggagctctctgatttggctgggctgactggccagcaagcccagggacactctctgcctccccggatttcaggaactcactggtgcacctgacttatttttacatccctggggtttgaactctggtccttatgcacagctagcactttcccaactgggccgtcttcctgttctcccccgccagcccccctctctactatgtagcccaggctggcttccagctcgttggtcttcctgcctcagtgttctgaatactgagattatgggcttgagccatcagagctagtctggctctgacttcacatggagacctaccatctttctaaagacactaatgcatagtgcttggaagtcattgttatttagccattcccctaccgatagacatggaggttagctatgattttattccagaacttccttgggcctctctggagttgctcttgctgggttatgggaacctgctgtgctttaaaaatgtattatccaatatttaaaatgtgtccgttaagagttggtgaaggaccaaacacctcccatggacgccagttatcccaggctcacttcttttgagctggatggaaaatctgcatccttgaccccagtgtctcctctccttcagtctcctctgctgtccttgttctagtgggagccgcagggaggcgcggtggtggtgggtgtccagaagatcagcagcctctggaatcggaatgcccaggctgaaatcctgacccagctcctccaagagccaccatttctagaactgtggcacctctgtggcttggctgtatccactgtgaaccagaaataacagcactcgcgtcattgagcagccttgagtgcaaagggctggccaggcaaagggtaggcagccagcagtgtccctgtagtggggtcccgcctctgccttcgttcaccatcgcctcactgggcgcagagcccacgtccctggtgagcagcctgggttggctctcgcctttgtgacgcctccattccccggtcagtgggtgtcccagaggacattgctgcctgggaatgcaacgggtgatcagatttctaccctgcttggccctgaaggttctggactggggcctgcagagagggaaagtggctgtcctggtcatttgctctgaggaggtggccaggagcatagcacctaatgtaaccccacaccgtggacacatttactggtcctcaatggggccgttgtggctgtggatttgatctctgttggcctgcatggtgggcaagagaagaaagcagcgtggggccagacttgccccctgggagctgggtgtcttagcaccatgttggcccaggcaagggtttgcctcagcctttggagtacagcattctcctggttccgtgttgagagaatggcttctgactcttccttacagccctggcaagcagcagagtctgccctgcctgaccagcttgccttgtgaaacaggtgccccggttgtggccgttgcccaggaggagagaaaccaaggttacagattcctaaatgacagtctcaaagccacccacatggttgaccactggcagggctgggagtggtagccaggccatctggctgtctattcactcctttcttacaaggccacccaatgtgatcattttggcagagggtggccagccgggcggcctgcttagccttgcctctccgggcagtggcgtgtggtcagcgagtgcagacagctgggattacattttaaaagcagaggagtgtgtggctggccccagcccagccctccccagcaccaagctatacaccctcctggtggttgaaatggccagctgaagagtcgctgctccaaggtcctctgccctgttagagggaggacactggggactcccagggaagcacagaaaagccatcactgggccagttttcaacggggaaaagtaagtctccgaaagactagtgggctagagggtgctggtgggtagtagggcatctgcctgccccctctgtccagctgctggctcgtgctggtctgctgtcacctcattctgaaggtactgacctggccctgctcagagtgaaggttgtaagcatagtgtcagagggatttgtacacgggtttcacacatcgcttgtgtactgagcgcttacctatggctagatgatgttcagtgccttgtgatgagccaactactcctcagaataacccatgatggccgctgttgttagttcccatgtgtagctgggaaagcctcaccacgtagcccagactggccgcagattcacagggcttctcttgcctccgcctcccaagtcctggagttacaggtgaacttggctagccccatcccagtcttctagcacaggctgtatgagcaagggagccatcagactgtggaataagggcttttctgggaggcagtggtgactgggggggtcttgcgggagttacgtggactctttgcacgccagttttgatgggaagaggcccagcagtgcagtttgaaagctctgtacccagggccccggccacagcagctgtgctcactctgggagacctgcagcagagctgattggagctacatcctagcggggaggtgctgcttctcccagctggccatacacacgctcagctgccagcccctggagtggaagtacattctctctgcaagggcggctgtgggtgttactggtgctctgggaccagagggacagagggcagatagtgtgcccaccttcatacaggacacttgtgttgccattgaactctttcagcctacagtgctcgctcccccccccaccccccgcaatcccctccccgccccaagcctccactgagcctatctctaacacagctcaggaaggtctggtaacttacctgactcactcgccttcagatgaacccctccttcagtggctcctgtgttcctcatgggtcccacaaatagaaacagctgcctagatgagagctatacccagggtctctactgggtctggttagttctatgagtgacacagccacataggcccctgtatgcagggaatccttcattccctcagccacgtttactctgcacaaatagcccaatagcaggatctctacaatggtattcacacttgctctgtggccttttgtaagccccactccctgggtcagtaagggatctccccccaccttgccagtggatagaacatggagggcttgctgttgggtctgagactggaaaacacatagtaggtatgagggctgccagtgtccccttgtcacactcacctgagggctggagatcaaggggtctgggttcagatcctgcttcgtcgcatccctgtagttgcccaagtatcctctcggagctgactctccctcacctgtgaactcggagggcagcagaatgggcagctcactggaacccaggcatgtctgcttgctggaggtctgctgccagggagggaacaaggagggacttaggaaagctctagagcccgtgccaacagcccaggaagcagaggccagaaatagaagagcccggagacaggggctccagatggccaggctgccctctgccaaccccagaggccaacccaagcccatgtacagtcctctctccaggggctggtcacagcataaattactccttggcagggcagactaattttaccttcgtggttttcatgattcatttcccattcggggacctgtgagagaaatggaaaggactctgctagttgggtgctagcatgctgtgtccgtgtggggttcccctgggctgtcatgatttggtataaatggtgcagtggatcccagggctggaatccatcagggttttgtttgtttgtttgtttgtttgtttgtttaccatagcttatgttggcttctgtggtagagtaaggaggttgatgggaaggtgtttgtcacttgctggtccagtgctgtgagtttttggatgccgccccccccaccccatcccacccctacattgtagtcacagaaagccagagcaagcaggtaatgaaggaaatgaagcccagtcgcctcattgttcagacagggagagtggggctcagcgcctaagtggaagaggtcccaggctcacagcagcacagcccgacttgtctcattttataaagggacaatgggaggcttctctagttctgatcacagcagggcgtgtccctctgccacttgccttccccgattctacttgagctgctccttgcagggacctggctgcctgtgctctcatttccggcctcctgtacctctgggagcacaagatgtcatccacttgagctccgagtctgcggggctcagggtagggagcagtccagaggaagtcgagctggcagctggatgcatcccaggtcctcagtctgccatacaggtcaccagctcggaggccaccacaggaaactcagaggctggctgcctggctgcctgccttcagagctggggaggctggctcatctgagcagggctcccacttgcgtccagcacaccgccactgtgtggagccacctgcgcaatgtgaccagcctgtctgactgtagagagcagacaccccaggctttcctgagggttcttctgtttctttaaaaccggcagaaagaaaagttgagatagcaacagctgccagtgtgccacctacatatacttccttccttcctgttgcctcagggtggagcaggttcgacagtgattttcttgtgggatcctctcaggaagacctgtcctggacagaatcccttcctctcttagttgcagttcatcacctgtcctacaggggtgccacctgagaatagtagcaggagggtaggctttgtgctggtaagattgcatatggctgctgtgcagctttggtcaagccacttaacctctctgaacttccatctgaaaagcgaaggaaaactgtttgcaaggtcgtggactttatggaatcaccacctgccagaaactcagccgtcacgcaaaaatggaatgcatgtggctgagctcgaggtccaagaggatcctgagagcttcaggcagcattggctccaggggctcgtacagtgtcttcaggacaccgtccagccttctctgctttcttctgtactggctctcctcacaggcagccactggggtggggttgtgggtgggggtgaggcacaagcctggcagcaggcacagctgttctgcatccttttctcttcgcagtggtctcctgggacactccaccccttcatccattggctgggtctcctacctgtccaccctgaggcaataggaaggaaggtgcactaatcactgaggactgctgatccaggctctgactggttggtcttcacaatcacacacctaagtgtccccaagacaccagacagtcggtgccagaaaaaataagggtcagtaaggcattcccataggcatagctgctgacccatgaggacaggaaccctgttctctggattcccagcaggtaggacagtgctggcatgcagaactgcaggaggacaggccacaagggagggaatgggtgccctccactgggtttagaagacaccccactctgccagggcattgtcacattagagcgtcccccctcccacctccttcctggaggcccgtgaggaaggtcaccttcctggcagtgtcactgctctgcagagcctcttccttctgagcttgtcagctccaccagtgcagtcccacaaccgcagtctgtcccacaggtgtgacaagcagacattacgagtggtagtgcccgtgtcaccatacatacgcaggtttattagccgacatcatccccccttggtctccttcatctgtaagcttcagtagctccccacgctgcttgtccttttgaagcagagctcctgccctgtcacccataggaagggaacagtgaggagtgagatcatgtgtagagtaggtgcttgcgaaagggcagggccaagccaggatctctgccaactcatggatctgtacgtgagcccttccaccttcgtggaaaaactgcttactctggtgtttatacatgactaccacacacacacacacacacacacacacacacacacaagagtcatagaagaatcccaggaccatagtgtctgtactagagtacaaaggatcagaacaactttattgccagcagctccgcgcacagtaggctccccctgcatggcagataactgcattggcaggacaggtagatcaccctgccctcaaatcacagggaagaatgtgatgagcatacagtgggtcgctgcgtaggggaagagcccagggttgagggctcagcaccttccagggcaaacagagaagccaatgtctgtcttctggaagccatcaggtacatgctcaaagtccccttgacctactttattactatgtgacccgcggcagaaatggtttgggggccagagaacaggaagcccttacagccagagatgctctgtggagatgttgcaaggatgcccagaactcaggcgggcagccctaccccatcttgagcatgcacttggacagtcccctaaaccaggcatgttagacagactgtgggtcaggaagtcgggggtggagcctagggttctgtttaaccagcgagttcacctctcacctcacttcaccagctgtccagagccgctcggtacatgcgagtacatctgagtatcagagccattctatatgtgctgccaatggcatcaagtatttgaaaatggatttctttgtctatgtgtgtgtacgtgtgtgtgtgtgtgtgtgtgtgggtgcacacgtgccatggtgtatgtgtggaggtcagaagataacttgagtcagtccactccttccactatgttatgcctggggattgagctcaagtcatcaggcttggcaagaaggacctgaagggcttttaactcattgagctctgagtacatttcacacagcaaccttaccaagtagatgctgcccatgtccacaggcccagagagattcaggcgcctccccagtcgcactacaataacttgaagcatcatggaatgctcttctcatcagccattctgtttcaggtcttgctgtcaccatggaggaggccgtgcatcccagagcctgttgagtgtccactttgcaccaagccctgttctggctgcaggggacacagcaagggacagaatagataagcatcttcacttcctggagtctacattctagttggagagagaccgggccgatcttataaataaataccatgcacattggttggataacggtgtggtcggcagaaagtacagcaggcaggagagaaagagcaaggggtactagttaatgtagaatgcccagagatttgacatcagtcgaagcctggagggaggggcaagccatgcgcatcctctggaaagagcactccttacagaggaaatagccaccacaaagtcatgtgggagggagggcaggctcctggggctatgctaggggtagtgggagaaagaaccatgagtgacgaggtcgcaggaaatgggtatggtgtcctgtataatctgctctgcatgagatggtcactgtgcagggtttgaagcaaggggccccatggtgatagattcgccttgactgtgggtgcccagtagggcgccactctggggaggctgctatgtgtgagtagctgagttcaggaagagtcactgggaaggagtagcttccttctttagtaaagctgcctgatgtgttgatgtgacggagctcccaaaccctagggaagctcggagaaaaggagagaaatggtggcatggaagcccacgtgtaacttttacctggtttcgtggtgtgagatcagatcacactatgtagcaggggctgcccttgagttccagatctggggtgaaggtgtgaggtatcacatccaggttctgtgcatcctgaagaggcccccgtaccaggtccctctccgtagagtgcccagtgcaaactcccaacccagagagcatgcatctgagttggtttccaaggcccagacggcgagctgaagccaccaggaacaagcctagtcagaaggggccccgtacctgcagtggggcagggcaaagcaagggtgggtgacagctgatcagagcggtgaccctgtcttcagaggcttcagagagagagagagagagagagagagagagagagaagcttccaggcagtgaagaggtgggctggctttcccatctgctgaccggcactccagctttgcccatcgaattccccccttccagtgtgtccagtaccaaacagttctcagatcctccagcctcacctgtccacactggctttccaggctcagcacagactccagaggactggggctcagtctcacgggacgtccacttcagactatttttttcagatcctaagtgtctatgcttcagaccactgtagatcaaggctccgagccttcctcagtctctctccatcatcccctgggttgatttacagaatgaaggaaatggtgtttctcaccattcctggcttatagaaaaggcccaagccagacactgccagatagaagagctgcatagggaatggtgtgtgcatgcatgtgcgtgcgtgcgtgtgtgtgtgtgtgtctgtgtgcgtgtgtgtgatacgtagcacatacatctgtgctctgggatgcacatgtgaagactgggggttgacgtccacccccatttctgtccaccttccttttgagacagggtttcttgttgaacctgcagctcactgtttcagcagactggatagcctgcaagtccctaagctctgtctgtcccctcccccacaggaccccatactcggattgggtgtgggtgctgggaactgaactcagtctctgtgctagcccagcgctttactcactgagcacttccccaagcccatattttaaaaaattgtttagtttagttttctggctctggtcattggatccagtgccctgtgcataccaggcaagcactctgcctcagaatcataccccagccatgtgaagtagggcttaatctccagcccctgttccccagtttcagagctcagtgggtgaggctgaaagctctagcactggccccaccctgaagctctctggagtccacagaagtaaactcaggtgctggccaaagggcttctgaggaataacaagagatattccctttagagagtgtgccagaaaccaaggacaaggtcaaatatgtttcttattgtacccatgtccttccgctctgttggctggcttcatggatgtgccctgcaaagccttctgcagagcttggctgccttggctgccttggctgcgggctttctcactgaagtcacaaaataaacacctttcactcactttgactaccccaaagtgggtcagctgtcagctgcagaggagagaaatcgtgtgtaatgatattccttaaacaccaggttcttgctggtagggatggcgcacgccttaaatcccagcactttggaagcagaggctgccagatctctgtgagttcgaggccagcctggtgtacagaatgagttttaggacagccaggactacacagaaaaactctttcttgaaaactaaagccaaaccagagagctggctggagagatggctcagggattaagagcactggccgctcttccagaggacccaggtccaattcccagcacccacatgacagctcacaactccagctccaggggacccagtaccttcactcacgaatgcaggcaaaacaccaattcacataaaataaaaagtaaaaccaatcataaaaaagaaaagaaaagaaagaaaaaaaggccaggcttcatgtccagtcgccggtaagaccatggaggtgtaccattgattgacacggtggctcctgcttctggggctgagagtggcccagctggtgcttgaagggagctgtgacacctgagtctgtcaaacacagtgggatgcaagcccacaaaaatagtgccactctgaaacagcttcttcagggcttgttctgacctctgcctttctgagtcctaccaacagaagagaacatgtggtacatttcagaagtcctcccagagggagcaccttaggaggagcacagttcgacaggcccaaacagttgggttccacagcaggaagccctgagctgactagagctcagttccacagttgcctatggtgtttcctgcctttgggtcccctgccttaggtcttgcctttgcatgctagttcatacaagtacacacacacacacacacacacacaccttacagaagcatgacaagagatacttccacaaatatacccatggaaccagcacccaggctgagaaatcaaacctgattttagcaccctaggactcttgttttctacctattccagttggctccaagaataactctgaacttgacccctactttacttcctctcgtagatgtgactacatacctgatagaaacaatttgagggaggaaggctgtattttggctcatggtccgggggatatagaccattgtggtgagaaggggtggtgtctggaactctacctgtgatagatggggtgaggcttattcacctctcagtgacaggccatgctgcagagagaccttagtgggaaccggtaagccccgactttgggttctcctctacctgctggaacctagtgcaaaaggttcccacaccttccccaaacagtgtcagcagcggggactaacttctcaaaccctgagcctgggagggaactgggctaggaaacagtttcacactacagctgtcctgggtttgttccctttctttatataaatcaaatcccacaggggttacggttgagccatagtgttcatatagttgtgattagaatactccccttcccgcattgcattctatccattgattggttttattttaaaacatgaagctgaatacattggtatatgcttgtcatctcagctcaggaggctgaggcaggaggatcaagaattcaaagctagactcggctttagcagactgtctccaaaacaacaaaacaatcaaaaccaggaagtttgctgagccatgcatgcttcaggaggaggcagggcagagtgagtgtgcatggtcctttagggcctttgcttaggatgctgaccgctcgccagcctgttgatctgattggcacatagcctgagtgtggtgtgaagggagggaatgcatgcagcgggcaggcaaatctttcagagcaggaccataagacaagcccagggatgcttcatggtgaacataccaggctgccttgctccattggtgggcccctcacccatcacgtatgtgcccagtgccccctttgtactcagtttctaacctggatccctccctttgccaccccggggttcaatctaagagtctgttgacagatgggaagaattcctttaaagcagcggttctcaatctgtggctgtggattgcaatcccttcgtggatcaaaggaccctttcacaggggttgcttaagatcatcctacatgtcagacatttatgttaggactgcagttatgaagcaacagtggaaacagttttatggttgggggtcaccacaacgtgagtaactgtattaaagtgtgcagtgttagaaaggctgagaagcactgctttaagtgcttaattctctgagcccctccctcttttcctccctttccccctcctcccctccccatcttcccctccctcctctcccctctcatgctgaggtcaaacctcatgtggtttacccagatcctccaatgggattactttgtgtctctttgtgccactcctgggctcactccacactgtatagcagttttagactcaccgcaaaacagttccatgtccctgctcctcgctcacccaccacaagagcatgtgtgttatttcacttggtgaccttacagcgagaacattgtcaaagtccactggcatgggagtccctcttggtattggcgttctctgattccaaacaaatgggtgactgggtgctgatatgtgtctgctatcagagtgtctgtcacttcctgagcagtctagtcctctgctgcttccccccccccattactgtccccacaggtgtcctttctcagaatgtcacacagtggtagccgtgcaatacacaaatttcctcagtgaccgtctccactctcctttcatgtgtggagcacgtgttgtgtgttgagagtcgcccagcagattgtgaactgccatccagccttctagcccgtgctctgtgccaggttctctctggtttggaagtttaaagcacttctgtgtcttggtgagcataaatcccaatgtaggggacagctctgcaaatccgggtttgcttgagccatcgcctgtacgattgcttcctattgcttccttacagcggattcctagggggagatctctcatgcagagagagctggcccttggattgaggactcaccctgtagaaacactctcccacgaatgtcacactccagcccctaacatttgagtaaaaacttctcgctctgggcagtcttcaaaggcttgaggagtttaaggttttgtgtgtttactaatggagatgtacaatggaaagggctgcctaggactaagaaagatcccgatccgaggtcgagttcaagccgcgaaaggatgagaactctgatgatgagtgatgtctgccatgcgtgtcacattggagactataggagactataggtgctcatcatctctgacacccagagcccaagtgttaataagattttacacttttccactgagcattttagtgtttatcacttcttttataaaatgttcaaaatttttctattgagttgagcatcgtgatagctggaggagaagtatttttctattgagtgtagtaactgctgtgaagctcttcatccaagtgctaaaggtacgatttagggcttcacacatgattggcaaaaggcctacttctgacctgtattctcaggccaactccaaccccccctttttgttttgttttgttttgttttgttttgttttgttttgtttttttcgagacagggtttctctgtatagccctgactgtcctggaactcactctgtagaccaggctggccttgaactcagaaatttgcctgcctctgcctctgcctcccaagtgctgggattaagggcgtgcgccaccactgcctggctccctttaatgcgtatacttttctttctttctttctttcttttggagacatgatcttactaagtttccatggctggccttgcacttgcgactctcctgtcaacctcccaagcagctgggcttggtttatgatacttttaaatgacactaacatttaactaacattagaactactgttaataaagaaaccctgtctcaaaaaaatgtaagaactactgttaataaagtatttactagggactaaacattgtgtgcgcaaacctgacctgcgaagcagaaatgtgcagatactcagtccctctaaacaaatgggaagccaagatgacaagtggtcatttgtcaaagcctgggtgtgaccatgctggtattggtgacagaatgtatgctggtgtaaaactcccataaaattaactggtttgtagtggctcacacctttaatcccagtacttgggaggcagaggcagatgtgagttcaaggccagcctgatttacatagtgaatttcaggacagtcaggactatgtagaaggatcttgtctctaaaagcagggtggagtcccatgaattctgtaacatgttttaatagatttatctcacgatgatgcactctagtaatcctggcttgtgaggaagacaggaggattatgaattagccagactcttatcttagtgagtcttggaactcactatgtagactaggctggtctagaactcagagagttctacttctgcctccccagtgcttggattaaaggtgggctccactgcacctggctcagactcttaaaaaagtaggtaataggtttttttttttttttttaatgccttttgcatgccctaggagcagctacctgcatttgcaggcgtatcttacaggtaaattcaaggaatattgatcattctccccatagatagtgcttgctgggcacataagctcaaccattcaggagctggagagatggctcaggggttaagagcatttgctactcttacagagtatccaagtgtggttcttaggacccacactgggtgacccacagctgcctgtaactccagttccaggggatttgatgctctcttctggcctccatgaacacacacatttacacataccttggtatatgtgtgtacacatctatacatacatgtgcacacatatacaaataaaatataattttaaattcagctattccttctaatacttcccaaatgtccccgctcccgctcccgtggtctattgattaacaccattaattgatggggtacagattaggaggttgaatcgggaggattgccacaagtttgagactacatagtgaaaccctgtcttaaaagaaaatgacttttcaagaaggggaaactgaggcttagaacataggtagaaaatgtctcaatttatggcacaaacaagaccaagcgcccaggtatacatctgaccttgagtcctttagatattcaaggggacaggcagggtggataccaaacagcactgcaaactctccgggggccagacttaaggaagccaagtgggcacagcctcctgatgccccagtctcctggctgccaggcaatctggggtcctggctctctgccaagggtgaaaatgagctgcaggcctctggccactctctgcccctcctcttgggtttgcatctcattgctggaggttccaccaggcttaatctctgcgagtgcagactcggaggagccagactggagggatcagtgccagcagcttggagagcttcatgaggctgccctctgcttgggcaaggagaacagaagaagtggcttttagagcctcacctggcctgtgccttcccctgatatggagtccggtgagggtcaccagccccaagcggtagttcacttagtcacatcatattctgacgcatgttcctgtaagccttccattgagatagggtctatttcagagtaaaggttcctgtgacccacttcaggcttcaaacgcacagcactcagacaagtgaggcttggccatggcctccaggcagctgggcttttctgagaatggagaggcctgagtagatgtcagggacagtgagagcaggggcaccctttttgttttgttttccgggaagctgtcccatcactaaccatctaacaacaggttattataattcattgggtgccacatggaagagcatagaagacagggcaggctcgtcatatctgacactctgtttcctaagcatcctactttgtacaagttgattaactattccttgtctgaaaacccaaatccaatgtatgtcaaaatctgacatgttcaacagataatcaagttttggagctttgggatttggtaaagagtatgccagcatcctagtgccaggacactgccaggtctgaaacacttttggtggaacatctcagataaaagtcatgttacctgagtgtgattctgtaagaaaaacgtgaagaaccacatgcaaaatgcacatgtgaaagccacaggcctctctactcggaggtggaggtgctgtctggtggctgtttgttttggattgtctatgtgtctcttctagttcctagccatgtgtctctttccctcccattgggtgcccttgtctctgggcagccaatgaaatacagcccttgtaaagccctggtactcagctctccaagtcctcccctcagtctgtatcccaattctcccataagatgctctggcagctatgatcatttttgacttacccatgaagactccttaaggcttagcacacggccttctgatgtggctgctgatgctgtcatctacaatgttcataccccagaccttgaacaaagcagagtctggagagatggcacagaggctcacgctgccctgtcatgggactcgcattcactccccaccatccacaccaggtgactcacaaacacctacaattccagctgcaagggatctcacaacctctctgatctccatgggcgcctccactgacatgtacagacagacagacctaaatcaataaaaagctttaaacactattgtaagtttatttattcttatctgatgtgtatgagtgttttgcatgcatgtatgtctgcacaccacatgcatgcctggtgcccacagaggccagaagagggtgttggattctctggaactggagttacagatggttgtgagctgcctgccaagtgccagggatcaaaactgggttgtttggaagagcaacaaaactgctcagctatctcttcagcccctattaaaaaacatgtaaaaagaaaagaaaatctcatgatgtcttaagtaaggttacggttttgtgttagccatccttgcctgcacgtgagcgtgtgaaccaaggacgtactgtaagaattgggctcccagctctataatctgagtcagctgtgcctgtcactgcgctagcctctcaatgtcagccttgtcatctttcttgacacgcaccttgccctgccatatggggaaggagagtcaaacatagcccacaaggcttctccttctgaagtctcttgtacagctgagtgtctgtggagccggtgggacacaggcgacacagtgcattttgacctgggccatttgatcatcagttcattgggcagatgcaagttctgccggggtgggatgggcccgaggccggggtgggatgggcccgagaccagggtgagacacagcagatgctcagagtgcagaactgaaggatgtccactcctatgcctcacagactccctgggaatggaggaggtcccttccatttcatgctccagtccttgtgtgctttcccagcctccaagcatttcctggcgcccgttacaggtgctgggacaccagtggtaagcctgagagcctgggaaagccatttgtcccgccttctgggagcttacagttgcaagctagctaaaggccgttttatatatatatatatgtatatatagtgtgggggggggggtcccaggcattgtggctggtggagtagacagggtccagagaaggggaacactacaaaatgcccccaagctgtgtggtcccagaaagccagcgtttgtcagtgattgactaaaaaagagaaactcaacaacctagtggagagcattctaagctgcacttgttggtgctgcctggctgtgtttctgattagctgtcttttttcttcgtttcttatttttattcattttaccttatctatctatctatgtatttttgagtcagggtctcactatgtaattctggctgtcctggaacttgccatgtagaccaggctggcttcaaactcacagagatctgtctgcctctgcctcctgaactctggggttaaaggtgtgcaccactataagtggctcctgatcagctttctatcctggggctgtagcctcttccacatttatctctgtccctgccacccaccacatctgatggaatctgtcattggacacatttcattggaaggagagtggactcctacaaactgtgctctgacctccacacattcatgacccccccccccccatacacacacacattagatagacttactgagagaaatgaaaaggtagggaagtcagacaacctttgtaagactctggggagccttagcttaccagggaccccctgagtgaaactcgtggagtcgggatcgatgcaaaaaccaagagaaatttattgttccagtgcactggggtcatcccagacccaaaggaggggcggcgactcccagcaccagttctgctgcgttttatatggtttccaggggcagaatagagcatcagcaactaggcacaatatgattggtggaacagtgcatcctttaaactgattggtttttagggaataggtgacaaggacttcccttgtctgaaggtgagcaatggtcagtcctgccgaatgtgtcccccacccgcagttcctgccctgtgtgtggtctgagaaatgctactagtagtagcctctaccttctggaagggcggagtgtttccccgaccttcccaaaattcctgagttgaccttttcaccttcattatcaagcttgccaaccatggccaagtaccacagactggccacatggctttacttcccaagttctgaaggttaagaggtcaaaggccaaggtgcactcagccagatgagggctgtctacattgcagatgggacttttctactgtatcctcacaggcagagagccctgtgtcacctttctttatgaggttacctgaccctgaacacctatccagtctttgcctcctctccaaatagtgtcattaggatttaggacttgaatgtaggggagcgacaaagggttcgggctcctaacacctgctccatgcctgcgcagcgtcattgagacttgaactctcagagtgaaggctgttcctagacgcagttgtgggactcctgcccttgcaactgcatcccagtcagcttgcgtgaccttgggccagtcccttctcagccttcagcccttcgcaccccctttctccgcgggtggcaagggagccatcgccaaggccgggaggtggagcaaaacgcggcgctcgcacccggggcggtgcaggtggtgcagggcgcgggctgcggtggccgaggtgggtgtcggcggcggcgctgcggaggcggctgcgggccgcgcgcgaccatccgcgcgtgaacccggaagaagagtgtcccggggtctggcatgaggaccgtggggaggggctgcagccaggttctgtggtcagggcggtaagcatgctctggggacactcccccctggagagagaggtgggcttggagtcagggcagggctagccctggctggcacacaaccagctccccagccccgcctgtacctgctgtgagctgcccaaggggcccggcttcttcctcctggcagcccctcgcttggggcctcacagccagccatgcagagctcatttcagctttccactccctcgggcccagttggatttgtggagtccccttcctgcccactttggcagtttgtcaggttcttgggggttccttgtgtcctttggacgtagtgtccgggctgtgcttctcaggcctgcctcctggcctgagctgcccctgggccttgaccccatgaggctggtggctccagtcgtccccaggaccagcccgggatagaaatggcatttcctcttggccaggctacagctgtttttgttgtctgagttctcaaggcttcctcttgggatggcagggagggtaaccagactcctagggacccctgctctctctcccagccactcacccctcttcccctgtctctttcatcttcttcctgtgctggtcccgcctcccttgcctgtccccaggacagaatgactgagaacatgaaggagtgcttggcccacaccaaggcggctgtaggggacatggtgacagtagtgaagacagaggtctgctcaccactccgggaccaggagtatggccagccctggtgaggcccctgggtggtgacttgaggaggggaggtgggtggccatgctgggctggttggggacccaggggatgttcttactggatgccagccttccttgttggacagttctggggtcagaggtgagcaggcactagacggatgggggcagagtttcccagagcccaactctcaggaattcccgcgctccactgctcctacagtgaacagccagcctgttggagtttttttgcccatctgcaactctctgcctcctggacaggtgtccagtctgtcttccccttgggttgtttctgatggcttcattgctttcctttttttttttttgtgggcccttgcccggagcagctctcggagactggagccatcttccatggaagttgaacccaagaaactgaagggaaagcgtgacctcattgtgaccaaaagcttccaacaagtggacttctggtgtaagtagagctgaggctctctgggtggctcctcccttcaccccatatcccatctgcccctgggtcattgtgccagagtcgcagtgagaggcatccacctggggcacaccagggctcagcagcctgtcttgcgtcttagagtccacagatgaccccaaacccaatttttttcaaatttgagacagaagccttgacattatagcatgtccttcagtcctccagggagtaagtatcatggtttattgcttctgatggacctgggactgcagctagctgggcagatctagggttggtaggcttgagctacatgcacagtattttctactgatcctcagtggcccccagttgtttccccagccagtaaggcggcggttcttatatcccacctctactgaactttccctcttcttcacattcctccagtctgtgagtcctgccaagagtacttcgtggatgaatgcccgaaccacggtccccccgtgtttgtgtctgacacgccagtgcctgtgggcatcccagatcgggcagccctcaccattcctcagggcatggaggtggtaaaggatgctggcggggagagcgacgtgcggtgtataaacgaggtcatccccaagggccacatctttggcccctatgaggggcagatctctacccaagacaagtcagctggcttcttctcatggctggtgagtgtcccctgtaccattcattccctgggagaggtcgacaagggactcggagggaaacagtcaggtgataatttatgcgtgcacaagtgcttttctgtgcacatgtggatgacgggtcttgctaccgtcttgtccagccatgtggcttttgtcctttggtgtccaaaggccatgctgaagggaccccacctcagcagcaagcaggtgagtcatcaccaggtaataggtaaggctgattttcccaagtgtcctcctgtgtgggtgtgtatgcatgtggctgtccattcagtggtatttacaaagacctcagccaacccgtcttctaaaatggaagacctatagctcggggctgcaaggtcatagaacatgacgttctgctcagaaaatgggcaggcaagggactggacggaaggccttccaagacaggcacggttcccattgttgagagtgagcagcgaacaagcatgtagatgtgattgttgccaccagagggggagcacagcatactttgggacattatgtttgtggtacctggagcctgcattgggaatgtcagccagctttactgtctacagtctaatggccttgagtgtatcacttttttctctgggcctgttttgcgacacaggctaataagagctgcggtgaagataactccaggtggcctggcaccgttcttgggaatgtgatttctcagtcactaaagcatttatcattgcttgatgttactgctgttggcctggttgaaggctgagttccttcagaataagaattggagaatgaggtgcagctggtcttgggaggggatagaccctcattccatgtagacaggagagatggagaagaagtcggctgtggtagcaatggagatcagcagagaggatggcggggactgtgcgtgattaatttcccaagactgaggactcagggaagctggtgatgtggccaagcagaaatgtggctgagtcaggctgtggcacagaaagtcttgatctcggggaggaggttggggagaaggttcatgtcagatgagcatggtgatggcttgaattgaagtctggaggtgggtgactctgagagattcaggagggagagccctgaggctggtgggacagctagggtgccaaagtgaggagtaggggctttcgaaaacataaggagggagtcctaagactgctcacgggggagagatggacagttggtggggcagtggagtggtaaaggaaagcagcgggaccatttataccacatgtatgcctctccctgagcatctccttggtgccaggcccggggagcaggccagatcaggtgtaaatcctaccttcatgggcaggagatggagctaaccaaagaataatgaaaatgcacataaaaccacgggcaggggttgatgagataggaagctaggaggaagtgaagaaccaggggaatccatgtgaacagaggacagaagaggccgacagatgctgagctggggttgaaggaagaacatggtcctctgtattagttagggttctccacaataactgaatccatccatccatccatccatccatccatccatccgtctatctatctatctatctatctatctatctatctctctatctatctatctatctatctttctatgatttattagactgactgactatctatctatctatctatctatctatctatctatctatctacctacctacctacatacctacctatctacgatttattagaacgacctacagaatgtggtccagctaatccaacagtggctgtgtgtgaatggaaggaaggtcccatgaatcaagcagttgttcattccatgaggctggatgtctcagctggtcttcaggatacacgagaatcttgaagtagcaggctccaatgccagtgaaggaatgaacttgatagcaaggcaagagcaagcaggcaaagaacaaaaatctccctacttccatatccttctataggcttctggccccagattagaggtgtgacttcccacctcaaagatccagattagaagtggatccccaatccatcccataattagcctccaagcaatggcaccattgcatacactagcaagcctttgttgcaaggacggtgatatagctgtcccttgtgagactaggccagggcctagcaaacacagaagtggatactcacagtcaactattggatggatcacagggcccccaatggaggagctagagaaagtatccaaggagctaaagagatctgcaaccctatcggaggaacaacattatgaactaaccagtaccccagagctcttgactctagctgcatatgtatcaaaagatgacctagtcggccatcactggaaagagaggcccattggtcaggcaaacgttatatgccccagtacaggggaatgccagggccaaaaaatgagaatgggttggtaggggagtgggggggacgacttttgggatagcattggaaatgtaattgaagaaaatacgtaataaaaaaaaaaaagaaaaaaaaagcagagagaatatccaaagtaacaaagttaaaattgaatggtggtggtgggggggaggggcacaacgacagatatcaaggaattgtgatgacacactttattcaataaaatttgaaaaaaaaaaaaagaagtggatccccacgtcaagttaagcaaaaaaaaaaaaaaaaaaaaacaaaacaaaacaaaacaaaaaaaaaaaaacaaaaaacaaaaaacaaaaaaaaacaaaatcctttgcaggagtccccctcagttcttgggttttacttaattccagatgcagtcaagttgacaattaagaatagccatcacatcaccaaagcacacattggtgagggggtatcagatcagtagatctgcttgagcagaggccctgtggtgggaaggggcacacagcatatgtgaacagcaaacgtggggctggagaaggcctggaggtggggactgggaggggtcttctgcagactttactctgtgaaggatgctgggaagtttccaggtaattgtttcaagtaatgatgaatgaccagataacttttgtttctttatttatttgcttggctgtgtgtatatgtgttcagggtggtgatgtgtgtgtgtgtgtgtttatgtgtgtgtctaattattctctcccttatgtttgagacagggtctctctctaaacctggagctcaccaattcagctagactggttgaccaataaacctccagggatccccgtacctccccagcactgggatagtatgtgcacgccacggcattgggcttttacctgcgatgtggggatcagctcagttcttcacgattacacagcaaacactgtccactgagtcatgtccccagccccacattaatgtcttgaaaggacaacattggctgcagcctttagagctgactggggcagagatgtggcactggttaggaagccggtagtcaatgtaattccaaaccttcaatggaggtggcgtgggtggagacagggacagagagacagagactgaaggatcgacttgaggacgagatgggggatgaaggccagtcaggatggcatggctttagtaagggacccaagtatcaaggccagcttaggtcctccctgcctcccaccgagcacttctgaaatgaggattgctggatggagagaaggtggagagtgactgggattctggtgttggccttgctgaatggcgatgtcagcagacaggtggatgtaccgtcctggcccatgcagcaggagtgtagagatgtgacttatgttcgtaggtggctagtggaagtggatggggcctagcctcaatgtcaagggacttcaaaagttaacagtccagaaggaagcatgggagagagcggcactgggcgaaggcaggccaggagagcgatctgcccacatagcaagaagagaggtgtacaaaggctctagcctctcatgctaatggggagcccagggtgacagagctcagaagtgtctattgatattgtagccacaaaagcattgtgacatcagaggaacggtaggtccaacctgggatcttgagctcctatggtctttggccatgctgacagctcagggtgggggcatgctactggtacctaaagacagaggctgggggccaggtttaagtggtttgtactgcctagaactgcagcctacaacaaaggcttatcaggagccccttgcaggagagtacaggagctgggcacctgattagcatagaggtggcctgtagaacaacttctcagaatttggctagagctcagaagtgaaaaagagagataagagaggtggatggtgattagagggtaaggggagctggtactagcaagaaagcattcttagggccagcaggaagaggctttggaaaggagcaggaggatgaggtgagaacaccatccatacatgcatttgtagcacctctgtctggaaggttctgcagaagccgctgagtatggaaaggggcggctcagcacattttccatcacctaagggacaacccagggtaggtgggtgtggtagactaattaattgctctttgaagattaatagtgttcattgccaagttgacaagatctggagtcacctaggaaacaagtttccaggagattgttgagcctgtggggagaattgtcttgataggttgatggatgtgggaagacccatgggtggtggcattccctagacagggatgcttgactgtatacagtggagtgaggtgagcataggcactcatccctctttcttctggattgcaggtgtaatgcaaccagctacctagtgctcctgcccatgtggcttccctgttatgatagacactggggctatgagccaaatcaccctttcttcttcttttttttttttttaattttttaaaagaccattttattttatttatatgtatacactgtcactgtcttcagacaccctagaagagggcatcagatctcattacagatggttatgagcaaccatgtggttgctgagatttgaactcaggacctctagaagagcagtcagtgctcttaaccgctgagccatctctccagcccccaccctttcttcttaagttgggtttgtcagtattttatggcaggaatgagattaagataggtcccacagtgtccccattcttgtcctcagagctggtgactgtctttcggtggcagaaggtgctagcatctgtggttaccatgaacatcttgagtcagggagatgatcttaggttttctggctgggttcaagataattacaaaattcttccatggaggaagcatcagagtcaaatcagatgtggggaaaatggtttctgttgacctcccagaaatggaagggactgggaagtgttaggtctcaaagcctctctcttcctctctggctctcttccccatcctttctcatggttggcttcagtctgcacccttccggatgcccctgcctgtgctctcccttgtatgtataataaagacctcagccctttaggagcaccctgtcctctctggtcttctcatccaggaggcaggcatgctggctccctattgacgtgacaagacaggttcttgatcagaagaggtctgacctgcagaattgtaaaagaatacattggctttgttcagagagagagagagggagagagggagaaggagagttagttcagcaataggagacttagactaacagaggaggcttgtgggtcagggctatctgctacaatcagtgtcttcttcatttgctcccactacattgatcaaggcagtaccttttgctgactctgtagccagcttttgcctggatttccctggctcgccttcctgagtactgccacacctgcccagctttcacagagtctggggacatgaactccacctgtgcagcaagcactttatccaccaagccccagtaatctctttattttccccgtgtttgtccctgactttgattactgttaccaccacagggagctttgccagaaggaagattttatttacttagacaatgagtatctgtcactgtctagtgacaagtagtgataactgatattgcatagtcaactcttgtgtgacactacctacctcaatgtcaggaaacacagccaatcgctattttctgtaatgggcaagatgagaaactatcccgttttgtggatcgcagtgtctcttgcaaggacagatgtccttgagatggtgctaaacccagaatgtacgcaggtcacctcctctccccagcatcccagctttgtgtgtgacacagtgctctgtgcaggatcagttgtcccatgtgactgcaggggtgccaggatgtgactcggtgctgttggaaacccttctaaagcacggtatggtacttcgcatcctcatccattgtttgattttttcccctggccatttcagcttgcactggtgtcacctgcagggcaggcaggtccttctaggtttgctcaaggttcttcctgctccaagccatccttgtcagtcccacctcctacacttccaaaggtctactgtaggacctgatgatgccctttgcttccctgggagagcctactcctcaccctgaggaaggggtaggtggttagtactgatactgggtccgtgggatcaggtgcccctcccaggcagaaccataggacccttaagggggagcactgtctgacatggccacagggctctggacagttcagatcctggttcttcaactggctggaagtacggctttgagtttgtcatctgttctctcagtggtctagcttcaacgtgtgacacaagcacacagcctctggaagacagaaacccagggagctagaagtattgatgttcagtgagcctggcgcctgtggtgatgggcaggtgacaggctgctttgattgtccttggctaacttcatgtggcttcaggaagagagagagaagatgaagtatgtaagattggatataaggtctgggtttgtgtgaacaggcctcatttaacacatctccagggccacacacacacagacacacacacacacacacacacatgcaatattttatatgtgtgtgtgtgtgtgcgtttatggcaatgaatacacagaaggaaagaaaatccaccccacagcagtccaacagttctaggaagcatcagaaatcacccaatgctaagaggcggaggcagagagtctggcagttgccgagggctgagttacagggaagcaaagcaccaagtgtctctcatgtaagacgacagtcctcgaggtcactgtagagctcagggcctggaacagtgttgtgtcagggctgccaagggcagtgtggataattcatggagtcacaggaacaatggtctaaggcagaggtaggtcgggcatgggttgggctgatgtatcaaggtgtgcacttcttcccagactcctctagggcagactgttacaagtgaactcccagtgggtgtgacagacccctggaagttgactttacaaacacaaattttatcaacagcagtcttagaacagtaaaaggaagtcctcatggcttcattggaacgatggtaatagactaaacctctgaaactgtaagcaagccccaattaaatggttttttcataagatttgccttggtcgtggtatctctttacagcaatagaacagagactaagacggtagttggtaccgaggcctagggtgtcggtgtgacaggcacgaccatattgtttgctggaggatatagaagactttgggcctttgggctaggagagcgtttggatgctttacgtggggcttactgggccactgtgagggcctagatcaagaagttttatagggaaagcatattaccaagtgtcctagaaacctttcctgtaagatgttggcaaagattgtagctgctgttatcattgtcctaaaaatccgcctaaggttaagttgaagagttttggattaatggcactggcagaggagattgtgaatcttcactgtatgtatgagttattagtaatcactctggcagacccataaggagaaggagcaaactgtacaaccagaaatccaaaatatgcagtttgaggagagagggagcagcaggaaacgtgatactggagccaggatctgtgctcagggggaacaatgtgtaaagaaaaacccgatgctaaaagtaataaagggcttggtgacctgaggataggaccccatccagccaaggtcctaacggatgagaaggaaccagtggcaagcgtcaacagtgaagggaagcatccacaacagagctgatacactgccattctgagaagggccaagtgcttgccccagcaagcagcagaacttggcagctttggctacatagttctggctttagagttcaggatacaagaaaggggttgtagaatctcctttcatggctacggaaagttgccaaggccaggcatatgtgaggggtatccctacatggaggcctagagagaccattgtgtgtagctgtgaaggtgaagcctgggtttgccttggagatccccaaggtgttggttatgtcagagtcctgggagacttgcagaggagagctgctaacctcttaggttgggacccagcctaagagaagtgtgttgaggtggacaaagctgaagggatttagagatctgaagaccattttgacctcagccaaggagatgcagaatttggagttcattctgctgagctgtggtcctgttttggcccagtatttcccccccaccccaactgcttccttggctcccttttgcaatgataatgtatgttatatgccattgtatgctggaagtaggtgatctgcttttgattttggttttacagggggttacagttaagagatggcatgaatctcagaagagactttgtacttttaaaagagtgttaagactgtgatagactatgggaatttttgaagttggactgagtgcatttttgtattaagatatggctataaacctatgggggcccagggagtggaatgtggtggtttgaataagaatggccccaggatcatatatttgaatgcatagtcaccaggaagtggcaccatttgaaaggacaggagagattaggaagtgtggcttgttggagaaagggggtgggctttgaggtttcaaaagccctgccaagcccagcatggctctctctgtctgcctatggattaggatatagctctcagctacagcatcccctgtcagcatgccaccatgcctcccaccttgatgatgatgtgttaaacctctgaagccataagccctcagttaaatgctttctttcacaagagttgcctagattgtggtgtctcttcaaagcagtagaacagggactaagatttctaagtcttcaccattttgtccctaaagcttgtcactctagctgctcctctgatggcatgtactgaacaagcttgaataaagaaaatcctggggctggagagacggctcaggggttaagagcactgactgctcttccagaggacctgagttcaattcccagcaaccacatggtggctcacagccatctgtaatgggatccgatgccctcttctggtgtgtatgaagacagcaacagtgtagtcatataaataaaataaatctttaaaaagaaagaaagaaaatcctaaatggcagtaaagctaagccaggaacgtcccccaggaagccttttggcctgcgccagccaccatagaggccacagaggctttgggttgcttccgtgtccttcccagcacagttagatccctccgctccactgaagctctaaggaaccaaaaggtaattagtaccactctgtgttgactcgcatacaccacgcctcaacctagaattaacaacagggaattttcctcaatggcagtcatagtcatgatgctaatacccaccattagccttttgctatgctcaaggctgcaaggctgcaaggctgcaaggtggtgttaccgagacaacttgccggaggccacacatgcatgtcctaaactgtggaggtgtgacataggtgtgcagtgttggtgtgaggacggaactcccgggtatactagggcatctgtcacctgggaactggtggaggagggggcctgagctgcaacacatatgacctgaatatcttaaacatgtgtacttgtgtgcacatttgaattattcatttactttatgtatatgagtataccgtagctgtcttcatacagaagagggcagtggatcccttacagattttgtgattgctgggaattgaactcaagaccttaggaagaataatcagagctcttaaccactgagccatctctccagccctcttatctctgttttgaaacaaggtttctcactgacctgggtgtgcagattggctagcctggctggccagcaagccccagagatcttctgtccatttccacagcattaggattacaaggttatatcacgatgtccagctcttttatttgggttctgaatgggagagaaagaaaaaaaaaaagaaggaaggaaggaaggaaggaaggaaggaaggaaggaaggaaggaaggaaggaaagaggaaagggtgtgtgcgcctgggaatggtagaggagaaaatgtagataaaagggagagcagaggcagggacatccaggagagtccagagtgggtattgccagactgagctggatcatgaggggagagggaagaggagagccaggtacaacagctaggagatccaaaagaggagaggtaaattaaaatggctggattatacaaggaaggacaacccagcccacgagctggagaactcatgggagaggatggggtatgccagccataccctgtaccaggtagggactgagggatgctgggagagcccaactgccaggttagcatggatatgttaagcaggcacctcagcagcttgtccaagggttggagactagcagaactcaggtcttcacgcttgaatggcaaacatgataccaatgaggtcatcttcccagcaccctgtgactgagaagtataaagcacaaatgcagatcaggctcatacagataagtgaggagcaccccacttctctctcctcctctagcaataaagcggagttgaatgttggcagagtgcagcctgggtccccatagctctgtgctggtgaccacctgctggtaatagtggagcatacatgctggattgtggagtgtcaatgctcttgatacacctggctcacagctcctttgcccgtagctgtgacagaatacgtgagccagtcaaggtaagacctgggctcacagttccagtggtttcagtccctgactctgactgctttgctttgtggttgctgtgaggcagtacattatgccagggagcaccaggaagcaagttgctacaccatgtggcccctagaaagagactggccttccataagcaccttgaaggtcatgtctttgtgacccaagacctcccagtaggccctacctcataaaggttccatcactttccaattacactgagggccaagttactaactcagggtctttgggggacaatccaggtctaatatacacagatgtaatgcatgcaagctgcacagccattaccagcagggggtcacacaccagcacccaccacacacccgtgctaataggaccggaggatctgtgtggcactccgcagtgtggtaaggcagtgaagagtccaaagttctgaggggtttggttttggttttggttttatgtttgcttgtttggttggtttttggttttgtcttcttcttcttcttttttttttttcaagacagggtttctctgtataacagccatggctgtcctagaactccctctgtagaccaggctagctttgatctcacagtctgcttctgcctccagagcgccatcatgcctggctctgagtggtacctcttaaaaatgtgaactgtgttgccttgtaaggtataagagggttgtgtcccacagctggttgagggaagcctagcaaattaattgttggccccagttggtacaggctgtcctggtgtacccactcatcccttcttttctaacatgtcaacactgtcacgttgtgggtgggtttttgcccttgcttttcacttaaaaggctctttgttccatcaccctccaatcaaccaggattctaccatgtatatacactaagaaaggcagtgggggtgctaccggggatggcagagccctgtgtcttgtctccactccttagacctggtgagggagcctctcgagactcggagctaaccaacacaccatcaacagaaatgttctttatcactagggtctggagagaagtaatgggtgtcatgggagtaatcctgagagtccagggctgtggctcaaaccaggagctgcagaggtggcctagtctcagtcccacagattagaagggaacaggtccccacagctcgtcaaggaaatgcttacagcaggatgtgtggtcgcttggaggccacttcagtgagcattagttactactgcatgtctgtaactaaatgcccagtagaaaagaggaaaggaagaaatgctgattttagctcagggtttcagagggatttcagagcatcgtagcaaggaagtgctgcagagtgtatggtcttgaaaatgtctcacgtctaaagcacagggaggggcaggaaccagagtctgtcacctgggcccctaaagtcttcaaatatagtggcaccagcaggggaccaaccacactgtcaaagcacaagcctgcagggaacagtcaagactaaactgtaatattttctagagttttgcaaaagatctagtattgcatattgttcttaggagagaaaaatgtacgtctcaaaaatggggtgggggaatcttccggctccaggatgtgctgagtatgtcctgtcagggaaaaagtggaaaggagttggaggctgagagggtctttatttggaatttgtaatgtttatttatttggagtgtgtgtgtgtgtgtgtgtgtgtgtgtgtgtgtgtgtgtgtgtgttggttagaggacagctttcaggaactggttctttcctatctgcatctgtgatctggggattaaactcagtttgtcaggcccaagtcttagcgcctatacccactgagtcatcttcctgtctcaactagcaattttgggggagcaaagggaaagatctgagctggaattgactggtgtgcattttgtcggcgcttgcggtcagctacgttatcctcttataatttctgcgtatttgaaatgcttcatgagtgtgatgcacttgagctatggaaaggaggttctaggcgtcgtcccaagctgggctgatcgcccctcagagcaggcgacagtgactgagggacacagaggctgcattatactgacttttttctttactatgacaaatgcctgacataaatgctaaacaaaggaaaggatattttggctcatggtctagaaggttccggtccatagtctttggttccattaatgctgggcctgtggtgaggcagaacacggcagtaggagcctgtggaggagggtgttcacctcacagtggacaatcaggcagagagcaaggaaaggactcttcacagcattctctaagtagaattcaaaacggaatctcctgttgttcttgggagaggaaaacgcatgtttcaaaaatggggtgttctaaaataagcatcgtcatccggaaaagcatgcgctcaacacagacacaggagcctgatgtccacagttcatgttcagaccataacaggccagagtcagtctgacaggtgggcagggctcaggcgtgcaaacctgaccagaaatgaatctcatcagaagctcaatggataaaaccttgagatcacatgagtcacatggtctgattacaattgacaacagtttgttctgccattgttgaggagaatggcggaatgctagcgccagtgtcaaggggcttgtgattgctctgctccaccaagtcctcagggaaccagcctcgatctaaaaagtttccacaatcaagtgtgtgttgtatgcaatttatacctcaactaagctgtggaaacaaagaggaaggatcatgtcactgtgaaacccaaggagacaaatgaaaaagagacagatcttcaaaaagagtcagtaacactgaaagtgaaaaatatcaattgaatgaaagatactcattacaaaggaagcaaagccttgggcacagtggtgagtgcctgcagttctgcacccaggaggatgtgtgggaggattgaaagttcaaggccagcctaggtacagagtgaagggctgcccccaaaattttacaaaccgaaacgaaaacaaaacatcagaaaagcaagagaagtaagaaaggaaaaaaccccgatggatggaagagactggagtaggcagagaaagcactggtggcctgaaagagagcagagaaatgttccctgacacggctccgaacgacagaggaaactatggagaagcagctaaaaggcatgggggctgaatgagccattctgtttatttaatagaaattctaccgcaggagagtggtgtgaaggagaggttgtaccgaaaaacacaaaagccggggatttccaggaagtaaaatgtggacgtgctcattaaggagtgaagagaactttataatctttgcttcacaaataatgcaaaatgatgccaagtacacaaatcgaaaggctatacactgatcacctacaaaagatccatagtagactaacagtaggttgcttataacttgggtcaggaaagaactagagacaccattagataagctgacacccgtgctctctgatgaatattcctttctgagtgtatctctcttcctgctttagacttcaagcttaaaatctatatcagaaatgccttttaagggctcctgccctccacaaagaaagtaagggacaacctagaattccatggatctcgatactcaaaatgatagtagagtatagacatttggacacaaccccaccccaaaccccaagggtcttgagcatttgagatttcagcagaggatgaaccctttcaggtcactcgtgcctgggccccagtgacgatcttcacctcctacacacgcagcagagaaagaggctgccttcagcttttgtcacaacagcctggcacctgtatggagtggcaaccctgggccaggttacccaggatcctgattcagtcagcacggatgagagtggcgtcccttctcaggtcgtctccagggtctctaagacaatgggaatgggtggagaggagacagcgaaacttagacagcggctgaggttgtggtgggggccatgtaggagggcagagggaagaggtgagatgggaggatggagctggctcctgggcctcaggtagggagcccaggcacgtgcgagccccttctctaatggcccacttcagacagtctctctgttttccagattgtggacaagaacaaccgctacaagtccatagatgggtcggatgagaccaaggccaactggatgaggtgagtcccatccctgccagctccagtgagcctcaccagcctctgggctgggcccaggaagtatcttgggcctccaggatctcagagctctccaggctgctccagaactgcagctgacagggtttgaaagaagtgttctgttccccaggcttccatcagaggctctaaagagcctgtggccagaccagcaggctgcagggatcgggctgcatgccatgactcccagtagaatcctgcaaagaggaaaatgtccccaacctaggttggaccactaacatttatcctagggcagattcttgttgtctggatgacatcattccagggaagacccagaagtcatcctatggttttatgggaatgaaggtttctaacatctccagctcccttccctatggggctcacattaaacttgactgctgaccagcatgggtctaccctggccaaggctgtggcctaggactgtgtgtcagaagcatccttaaagtctagccagagagagcagagaattgaacaagggtcacttcccaggtggccacaatgagttggcatccatgctcagagctggcctgtgtggtatgtgtgggtcctaccagtgggtgtgtattaggaaaaaagtcagtttaactccagtaccacttggtggcctggatccatgggcaacgatggagcatttagatttgtttagaagaaaggaagacctttgaggaccagagacccagctacatcatgaatcgaggccctatcatgtatagttctgttcatctcagatagcagatgggtgacctttgggaaccaatgggtaggtgagagatgggggcagcaagagatgcctcaggatgtctgagcacatgaagaggacctggttggaagtggaaagtcatgaggaggtcccctgtgtccttctccgtggcttcactgacacctgtatgacctcagggctgcggctggtttgcaggacagttgggctcatcctcttattgagagtgcagctgtttccactgcggcaggcaggtgcagaatcagcgcccacatgtggcctcctcctctacaagatggtctgctatcctaaaagtggcaccagaagttgtacttgacgctcctagctgccgtcttctctctctgccctgaggtccaggtcagcttggcagtgtctcatcccttatgctgggcatctcgtcaactcagtcacattggaacatatgagagtaggccaggtcagccctgccctcctctgctctctgcacctctacaggcatgcctgctattgcataaatgccagagaggctcagacatgtgctgtgtgggggtccagatggaatagggaggagcctttgatatgtgccttctgagggtccaggactttgttgaggacagctggagcaagtgggcatgaaccttgcagaaagactgctgacggacagcacagccctgggctaggccttcgcatgcgtcaccacagtcaggtccaggcttgctgaaagagtgaacctgatgtatcctgtgacactgttacttgcagagctccagaagctatggcttagagagctggcctgtcccatgtgtcctcccatttctgagcttttgtttggttgggcaaagggttttcccgctgccccctagaaaatagtgcctcatctcaaccatcttggccactgtttagcacagcagggctgctggtgtaacttggctggggatgggtccggagcatcacgattctgcaagttcttgatggtgattccaatgtggccgctcaggctgacagccgttgtgctggtggtcatgccccagtgacaaactgagacccagagcagggcaaagtcttgttcacattcatgtcacctgtggcaaaatgaggcctggggtcctgtgtctctagctagacctgcaagccacagttctttctgataatatacaagggaccaagcagagcatggctccttatgactgtgggtgggttccgtgggtgggagactgctgcttcctccacctttgttaatatgactctgtcctgctacccctagcctgtcctgaccccagatgactctgggtggtcttggctgacgtgtcctgagttaagaaggttccaggagctggtgattgtgtttgtgtgtggctttgcttttgggagctcttgctaatttacagactcttagttgtgttgtcaccccagggctttgggggtgatgttgtagatcgacatccttatgaaattactggtggacccagtaaagagtaggtacaaaggtactcatgtcttgagtgttaacctgtgcaagctctgtgttaggtgctctgcatgcagtaagtctcagcctggggcatttgggacgcatgggcagtgctttcagacgttctaggtaagcacagcttcatgcgtgggtactcctggttttgcaggagtaaaaggtaagtgtattattgaacattctacactgtacagtaatctcctctcctgacccagactctgatttcccatggcggcgtaattagggccctataggcttcactctagtcttatagaggccctgtggtccccagggatagtctcaagtctgtctgagctcaaggcctttgtcctgagctgggtatcgaagccgcgagctttcctttgactgattacacgcgcttggctgaaaggactcagaagtaagggtggaggaaccgagagctgctggggcttctgtgattctggaagcatccagaggtgtgggttgggatccgagttagcctcaacaccctgcttcctcctgggtggaactcttgtttcaaaactatagcaaaaggcaggtagaaccggaatgctctttgaattctaaagccagagcaaggtcaggttgaagaacctcagcagaatcagttatcctggtgcctttgctagggtagcatgtctcttggtggatgctcacgggtgcctcgcatcttaactagaataccacagcagccacgccatgaggaaggagcctgtggtggtgcccctgagggagaagagattgttcttctctgaacatacatgttcagaagtagggacatgagagacactggaagatgggagacaagtcacaggtgacagaataagctttctgtggttgcaacatgatggacaccagcaaccagtgccacagccactgcaggccactgtaggctgtgttttaaactcacttgatgtgtgtgtgtgtgtgtgtgtgtgtgtgtgtgtgtgtgtgtgagaagatgcccaaagaggctagagaggggcaacagatccattggagtttgaatgaagggcatttgtgaattacctgatgtgatttctgagatccaaattctaatactcagcagagagttgtagtaaatgtccttaacccctgagctgcttctccagtcccttaagtggttaaagctcgtgtacgtagatggaaccctcagaaactggtctggacggggagaacgaggcagcaaaagctgagtgaacttgaacttcctggtgctcaaggctgatgagaggtagggcagcctaccctgcagtcactgggctcctactacctccttcctgccttccctctgaggaggcatcgctgtaggaggagggtgtggtggggccttggtggccccagatgtcccctggcttcccagatggggccagtgattaggaaggaggaccatcctcattaacggtcatttacccaattatgctttgtgggatattcaacccaaggaacgtgctgcccctggccgagcgtaagaggaagcctaaattctccaaggaggagctggacattctggtcacagaggtgacccgtcacgaagcccttctctttgggagagagaccatgcggctgtcccatgccgacagggacaagatttgggaaggcatagctcggaaaatcacctccgtcagccaggttccccgctccatcaaggacattaagcacaggtgggatgacatgaagcgcaggaccaaggacaagctggctttcatgcggcagtcactgtcgggcccagggatcgggggccacacctaccccatcatgctcgctgcccacgagagagccatcgaggcagcactgctcaccaccagggccgggcatggcttccccagggcagagctggacagaaccgacagcccgtctaccagctgtgagtatcgatgccgagtgtggggcttgcttcctcgtgtgcacttattcccatgctagctctcagccctgcctgtctccctgactctctccatggccccatctcgcttctgtcttgcctccacttcttgctcatccactgtgtgccagaagcccgcttgggagcaggaaggacagggctgcatctaaaacctacacagacacttgtcggactaaataagccccaggtggatccatcctgtggcctaagggttacgtgcacatagctatgaaggtggccgaacccaaaccataaccttgtttaaaacagtacaagtgttttgttggtttgtttggtacctggagcagaaactgtggttgaccttgtgttacagtgtcaaaaggttagacgtgccttcttggattagattattgttcaccttagaggaaggataagggctcacccagtccaggacatcccagatttccagctttgagcttgtgtgatctccaggcctcccaccctgggcctgctgctctgcagtctgtgctgggtctgggacacacatgaatggagggctgcagctgtagagaaggcctgaggctggctgaggaagatgtttgaagggcgaggaagagttaaccaggcctggtgcgaggcgcagaggaggggaggggaaggcgagcaggctgggaacagcatgtacaaggcccacatcaggaaggcgcttggcacgttccaggaactgcagaagccagggaagccccatcctagccagccggcagggggaggggcaccaccacagcagccgagtggcagggctgggctgggccggggagagacctttctccgtgactctgtctgctttgtccacttctctcccgtcttctgagcttgatccacttctctttggctcctgcttcttggtgctcacctgggactggctggccctgctttcttgcttcctgggacttttagcggttctagctgttctagctgtgttcaccaggagggggagccatcggagtccatccctgaagaactatcccctccctcccacttcttcacacacccatacccttcctcatctgctgtcctcagtggagtcctgtgagcagggcaggaggatccaaggaggctgtggggccgagcattcagccagcgggagagtggttcaccaagtccgacttcctccctggccctttgccgcggggatctgcttatttcctgtttggctgaggtctctgacaggtggccactcacaaagtcagcctcgggagtagaaaagagtggtcatgatgagggtgacttccttgttaaccagatgaggcaaacagtcttccagaaagtggaggtggccctgagacatcagaaccagacttgggcctggacctgccagggtttgctaaaacctcggggcgggcagcatctggaaaagcctatttcctgaatcctgccctgttcacccctccgtctcctagagatcgaagatgatgagattagcagaggtaacatggactgcaggggctcccaaatctactaactaatcacaagcttagcctggctgggaccgtagtggcctcagggcttggggaaagggtaatggccgttctgagtgctcctttctaccctttctggcatcccaagaggttggctgccacttatggagtatgctcaggaagcagtaggctccactgcgccagcatcaggagacccacagatcagtgtggtcagatcaagcactcacgggtgggccatgatgtgcctgacctcacagcccacatcagggggacaacaaggctggtggctcgccccacataatcctgagtcctgcatcagcccttccctctcatctccagccatttggcatctccctgtggtggtttgttaggattccagcaaggccacaaggtggccccaagcaactttgaaaagtccctcccttgtggagaccagtgctcacaagagagcagcttagaacctctcacagggatgggtagctctctcagctctgcaatacaccgtagggtctgggagccccactaagagcccagccggggccccgggggttcagcagagcagtcattattgtttctctgaaggtagtgaaatgtaatggcacaatcgtggtcatgagcccttaggctggcatggctgccactggagctggggtctcctttgctggacaatcctttcctggaatgtagctgcctctgtgggaagaagggaaccagctcccgctcacccttctaccgatgctggacctacacgtcccagggacttagaagctggcatttctctgtgtgtggtgccagtgtaggctgacgggtggccagcagggacttttcaaagctgtgacctgtgacctgggctgccccctccacccttttgtaatcacctgtccttctctccttgtctgatccaagatgatgaagacgaggaagctcccgggccctcacagcagcctctccggatgcccctgcttcgtcctccagaggaagaggcccccctggccaggcccacgctgctctattcatcttcctcagacccatccaagatgttggaccctaagccagaggtcctgccccatccctcactccaggcccgcaggaccccagaaccacatcccagctcgcctaccctgggcctggactggcatctcctgcatgcccatgcccatcagactgaaatgttccagaagttctgccaggagctgatgactgtgcaccgagacatggccggcagcatgcatgtcatcagccaggccatggctgagctgaacagccgtgttggtcagatgtgtgagacgcttatggagatccgagatgcagttcaggcatctcagcgtgggccagaaggggcagcccccatggaccacactttccagtctcaggcacccctgctgggccctacaccagcacccccagaaccagccccaatacggactaccaggtctcggaagagaaagcacaatttctaacctggccagtttgcctaaggagaagcaatgccggtggtgtctggccttgagttgggggagtctcttgtgtccagaaacaagactgatgaccgtggggcacagtcgtctcttcacctggtgcagtccagtctcctgtgctttcaccgagcgggtgtacaggcgcaccacccccttatctcaggaagatactcaagacacaagaaaagctgcctgcttgaatgcttgcttggcctagaaggctgctctcctcgtggcctgtatcctgtatcctatggagcaggccttgctggggcagggggcagcatccaacagaatcttgctttcaactcagggctgctgcagagctgacctcccaggtcctgattctgccctttctcaggtggtgcggggctgtgggtgggcggggctggctcagctgggtgggtggggcccggccatggccctgtgcttgccctgcgttgctcggctgctgtgcttgcctttgggaggggttggtggggggagaagaatgggatgtgctggtgaggggaaagagatgattttgcattcttagcatactataaacttttccccccccccccccgagcctgcacatggcaggccatctcaggaagccaagtcagtctttacaatcactgattactggtcattccagtcattgtcatgcatctcagggttcagaaatgatacagccatgatagtggggacctggcctgctttcttcaagaggccagatctggagtactaataatagatgaggatcctgctcctcacctaagctctgcctcagcttctacagttagaagagggaacaaaaccagcgtgatgagtatgccagcctgtgatggccttgagtctcacagccaatgaaggggaggttctgggccctggcctcaggagccagcaggcagactgtccgctcactggctcctaataaggccataaaccaatgagactgtgtccagtccagctcccagcatgccttgcctctgcttgcttgggctgtatactcacctagccatacagacttgtagctttgagttttgtttagggggcccagtcagagagctgggatctttgagtgagggaggagaaaagaagccaaaggcttcactctgacctaggtgcagctttgacctcgatccctggcctgaggctgaccccagcagacctttcacaccctaccctttctccctaagaaacagagtggacctggaagcctactggacccagtgctcactgaggctgttgctagcgctgtttataaacacacaccatgcttcgtcctacatgagatgatggacggatggcacctgctgtgcccctgagccctgggctccattgcctcaatctgtggttctttggtggttcctgccccatccatcagactgcatattgtcttgtctagtaatagcctggtgcctggaattgccccgcctgtccatgctggaacccaagttggccttctcaaatattttttgttaagatggcaataaaatgaatcagatgtcacactttgaacacagccaggctccaggatctttttttggtgtgtattctctttcttcctatcccagggaacccccatgagcctccagatcagggattagatgcctaatggaaagtgtatggggaagaggtccctgtggaccttgcatattctggattccataaactccctaggggcgtgctcaaccccatgcttggccctccaaacgaaaggcagtgacttgtaggccaaaggcagctgaacatccatggatgtcaacttttaatttttcctgcacatcaaaagtaaatttaaccttatgctcccccaaagtattacagtttccagggaaggaaatagtttctggctggagacttgagaggctcctggctgtccattaggggttatcctgggatactcctcagtagtggctacatctccactgacctcagtagctgcctgtgaaaggcaaggccctgcctaccaagactcctcagaagaaccagagttcttcctcttggattcactggagtgtgcctcaccacagagctgtgttctgacccgtcagcctggctaacctcctgtcatggagagagcttccgtgagaggaatcctcaaatggtagcctatgatgtactttctgaatagttcttagctacctttggctttggaatccagatcattctcttaagttcctgaccaaaatgcataaccatggaaattaagattgcagttggcaggagatacagagatgcagctggcctgggtctcctctaatacccaagacctgtgagactggttggcctctatttctggtgttggggaagaagaggccacattaaaggctgtgtacaagaaccaaggtcagagtccagggacagtggtcagtttgagatggaaatggtttccattttggtgtcttggtggcagtggggaccaggaagccagaatatattcaatatattcaataggaagaggaaatgaatggggagcctgtcccagctcttcccaaaaggaagccttgaaaggaagcccatagcatatgtgggcaactgcctggatatcagagacctaacccggtgacatcacagagcccagcttcttgtccagtcttcccatttctgtcttcctgggcaacttcctttctggtagaaagctgcgttggccatgacaggcttgtgtcagtcccattaaacaaagtggacgactccctgagccattttctttcttgagtcggaacccatagtcatttcctgacccagctagaaaatatggtgcacttgataagacccagtgggtgaggcctgagaattgtctcccggtgcttatctgtccagtacccaaggctagtgaggagacaggactcaaaacaatgtgttatcttctgggaagattcagtccagaacccctgcccttcccaccactgtcagtcacctacttatttctaggatgcctgactctgaactgccagacttgaactcagtctctacaggacagcctggacccgggtgtttcccaccctgctctgttttcccaacaagggagtgtgagctaggaattcagaccccctggtagacaactggtcttgaccacaaggaggagacagttcctggaaaccctggggtccttggccacgtgacacaggacagtatttcgtaagaatgagcacagcagaattccgagaatgtgccaagccactgagtgtcgccactgtaaagggaggggacctcattagaggtgatgggtcctgagtcttagctggatgcagtaaactttctcttgaaagttctgtcacataaacatgttaagtcctgggactcggtgactgtgattcacccacagttgccatctgtatctcatttcaaaagccaagttttaaaacaaccaaatgcaagatgctcaacacattttgatctgatgctggaaatactttgtgatctgtatcaagactgagtgagagtgctctctctaaatgctggctcttgttaggtagaaccacattgcagggggaggggggacgaagggaaatgcctgcaaaccatttgaaatggttagacccactccagacattgctgttttgaatcagcaaatcgtgatagtgacttgttccccatgtacccttttctctggcatttaatattgaatggctggccagaaactgaaagggagaagggagaaggtgctcttgggtgttctgtgaaccagtggttccccagagaacacaagaatgggatttctaccttccagatgtgtctggaacagaaaaacttggagctacattcattctgggtcctcctgaccattacactggatggtttgggaccaatcctagactcttgttaaattggaaacttggagctgaggctggtcctgtgagtggagcaataaggctgagcatggttgctgcagtcttggggtctgccttttgtccttgctgactatgttgtggctgggtgcttggagagcctcatgagattttcacagctcatggggttagggggctctctgatgctcatgtaagatacaggtggggatgcaagcgtgctgaggctaaggccctgggcaagacggctgacccagggctgtgagcaccattgatcttgtccagattggaggagcttggtgtttgctctcccactgcttgggtcttcatccctcagcttacaatgtcctctgtcgccagaatggattgttaactgggctccaggggatgtgtttctaaggtgccagcctcctctggggtagtcaagttgattcttcaggacctgtccagataagagcagatgggataggaggtctgcaggcacaggtctagcggtctccagtgtaagttcttggagctgtcagccccccattgtcaccttgcaaagaatctgacatctgtgtgaatgttttctctttgcctcttgagtgagagaagcagcacaaacattattgaggaaacctggaaggtacagacaattccagagacgatccacccaaagtgatggccgtcctggttaaaacacgggtgtgttgacttcaagcagttctgctgggagacacattgttagagcacagtatacttggctttggctccaacctgtctcactctgcatcacagcaacactgttttggagttgggtaaggtgattccaggatgttggaagtgtcatttgaaggaaactgggtgaggggtgtggattcattggtgtcttgggcattgctgagtccatgcgttccgggcccacatggaaactgtgagttgtagctcagggaatgataggccacaaatttgcatcattagctgtgcctttggacaagtttctcagcctctccaagcctttctgttgttgccgatcttctgctgtctctcctttatctattccccctttgtccttattgggccaactataaggatgctgctctaaaactgagctatcatcagtcactcttagaggatcggttaattctgctaagcctagcaaaatatggaaacagcccaaagcttccccctgccctaactgaggttaaaggtcagtgaaagtggagctggagcttaagagcctgctctttcataggacccaggtttgagtcccagcactcacatggtagttcacaaccatctgtaactccactttcaggagatctaatggcctcttctggcctctgggagggctctatcatatggtacacagacataaatgcgggaaaaacacccctacacacaaaatattaaaataaaataagttttttttaaggtcaataaagaggagaagggatagccacctgctattgagtctggggttgactgtgactctcaaggttggcagggcagatataatttccagtctcagattaaacaggttcctagggtccagagaatgtgttaacatgatactgaatagagatgtaagttaggaggaccagctctatagttggctgtctctggatgagacagcagctcttcttatgtgcccacatactttaagctcttgtgccctgcacctaaggcactcaaccaggtgtggcccatggttctcacctgtcccctccccaccaggtacgtggtcatttcccgggaggagagggagcagaacctcctggcgttccagcacagcgagcgcatctacttccgggcatgccgagacatccggccaggagagcggctgcgggtctggtacagcgaggactacatgaagcgcctgcatagcatgtcccaggaaaccatccaccgcaacttagcccggggtgagtatggccatgggaaggagcgagtgtgccctcagggccagggacatgcccataatgctaagtccacaagtctaggtcagtactgattgtgaagtgactcgcccacaaagctagggtcacgcctacaggaccaagaccacgcccacggggctaaggccatgtcaaccagcaaaggttacacccactctgaaccacaaaagcccagaaagcacctctgggaaccttccaagcaaaccaatgaggaatgcagtatcgagcagtgcaaagagccaggacaggcaagacctcagcaaagtaagccagtggccaccccgagggaattctctagtgtgcagtcctgagagatcagcaaatcccaaccaaataaatcagttgaataacaccaatcttgttaccccaacactaactgatgaaaagacacttctcactcagtacctcaatagataacttcctgtgtgctagctgggttgccttcactttgccatgggatcaaggtaatgagaactaacctgccaagatgttctgagagtccgtggagcaatgtacttaccaccgttgatgcaatctctacctcgactgtcactaagtccttggctgtaaaattctagaccagtgattttcgtgacatcagctccaccattgtacaattgtccaaactgagctttacagaaatgcagtgacttacccagggtcacgtgactaatgaggacagagccagctttccaacttgaggcatctgaagtgaggatctaagttttatccagacaaagccagccttggtgttgttgatcttgttcctgggagccaaaatgatacacagcatgaaggaatggtttctaccggaggaaggctagtacaggagaagatgggctcaggctgggagaacatagtgggttggctgtccatccatgtgccactggaatggctcatttaaaaggaacttggcttactccctgcctctggctctccagctgtagatgccatcctcagcctggccagggtacacaggtgcacccaggtccttttttccaagagagccatctttgcacagaagctgtacattcacacacccagagtcaatttggtcctcggaggcagagccatgcccaacgtcttctccgccgtcatcttaactaacctcttcactggatagccttgtttagaagatgagcggaggagatgggagcagatgactcactgaggtgaagatgattaggaagacaaagcagaacaggtcttggggtgcccaaaagctgtctgacttagtcaaaagcatctggcagttgccagcgagctgagagacctgtgggtaagcctatctcctgactcctttggagctgagcttgggccatgctggtttcattgggatggcatgcttctgggataaagggtggctactgtttggcctcttcctgaaattccagaagggttcctgtgggcctcggaacctccagaaatgtttggtgaacctcagttgcatcgataaaagcagaagtgaacgaaaacagccagggggtttccagaagaatcacattacccaaagaaaagaaaaccaagatgggtcacagctgctgtggcacagattcatctctttcccaccatcttggattcttctggaatatgtcttcctgtcttctccaaagcacctcaacctgaatcatcctcaagaagacctgagacccagggacatctcaaagagaggagagagcttggggaaatgaaggctcacaggaagattgagaagagagagagagcgagccttggaagatacaggattaaggtatctatctgcccgtgaccaggctggattgtaggcttcaggaagaaaccagcaaccacagtggacccagcaggagctgtgatggaagtggtccttgagagtgaccgtgggacttggcagctgatggatgcatgctagatgttaggtacagagttctagacctttaaatgtgtcttggatgacctatcagccctgcttagaaaggtccccattgcccagtcacttaaggtattacagctatattagctttgtgtgtgtatgtgtgtgcgtgtgtgtacatgtgtgtgtatatgtatatgtgctatacatgtatatgtgtgtgcgtgtgtgtacatgtgtgtgtacatgtgtttgtgtatgtgcatatgtgtgttcatatgcaggtgcatgcatgtatgaatcagcctcatgtgtcattcctcagtaatcgctttgcttttgagacaactctcactgacctggaacttgaaaaatgtgctaggctggctggtcagtgcacctcaggggtctacctgaacccaccgtcccagcactgggattgcaagtgcctgccacaacacagagctttttttttttttttttttttttttttttggttgtttttaaatgtgaattctggagattgaaacttaagtcctcatacttgcaaagcaaacgtcttatcagctgagctatctgccagtccccccgcgccccctttgtgagacacagtttcatctatcccgggttggccttgaattccatatgaagctgaggctggctttgaactccagagcctccgtctctacctcccaagcactggggccattgatgggcaccactgcatcttgcttttagagagaggagcatcttcatggtcagaggctgcttagccagatcgtacttattgtcgtttttttttttttttttttttttaatgaaagagtgttgtgtggagcccagagctcctggagaggatattctttattcctttgtggttatctttgaaggatacgagtcgacacacttaggtgatctgtgtgatttgtgtggggattataaatttttttctttgatttttatccatgaatgtcgtggaggatttggaatagaagtcatggtgacctttattaaaggttgtccgtggaccagggattttacatggaagccacaagttcagaaggctttcctgctcagcctagaaaacatgggtgactttatcttccattacagagacaatgagagtcttctgtgatgtaacacccagcatcttcaacggtctgatgtctggggagcccaagacgaggcaatagggcacccttgacttttcagagattcagcttggcgagcaccccacctgtcctgtgacacaaataccttgcattacatttttaaaattgaatttgatttatgtagtgtatgtaatgggtgttttgtcttcatatatgcctgtgtaccgcatgtatgccagctgccctttgaggtatcttctgggtaccctgggactagagtctgtcacagagggttgtgagctgtcatgtgggtgctgggaactgaactcaggtcttttggaagagcatccagagcttccaatctctgagatgtctctccagctcacaaaaggcattttttaaagggctccatctcgcccccgagctttctgcagttctgctggcacagatacaggggcttctgggagccgcccgagtgccaggagtccgggatgaggttgttgcttaagcagcgcctgtgaggacagaatagggacttgagtggcttaaaccctgctgtgctgttttctgtgggagcctagaggcgtgagggaagcagctgggggaggccaagcatggagcctcctgaccttcacccagggcctatcaaatcctttcacagaagcctggacactgaacagaggctcaaggttgcagcaccaggaccctgcccaattcaggtggcctttgagattgcgcaaccccacaggttctgctggcagaaccttctgaaggctgggaaacaactctcctcagcatgtcaccccctgggcatcccagcacttctgtagcagtctgtgctggcctcgctaaaggatctaaaatagcttactattggtgatctcaccaacatttcaaggtaattaaaaatgaaggaaagagaggcatcttttgacaggtggggaaatggctgtatctgagaatactttgggtttcgcaactaccttgccctaatcttgagggaggctgatactctggtatgtttaggaatctttcccaaggcacccccacttcttttttcaaccttagccatgactgagaaccacaagactttgacccatctttctttgtgtatttcttatctttagactgctgggagaatagagaggcagcagctgtagggtggctgtttcccttggctctctgggcccatgagcatgggaggaaggcagggcctgtgcttcccccgtgctttctactgaggccctgcaaccaccgtgtagtctctaggtctgaaggatagcttgtcccatggcgggcagacagacactcagctctgaaagctgttgcattagtcagatggagtgagatgctgtctcctggggtcatagtatggcaagccccatccccataggatgatgactccttttcagtctccgcttgagacatatgccaactcacaagtgtagcatttatcccatgtgaggcctttctgtaaaggtcctgtgactctagagcccacgatccgttcttctctccatttgggtctcacctgacccagatggtcagatccaggtggatgtgtcaggcaatcctctcgcagaaggcctgctctgttccctgtcaatttctctgtttggggctttcccccacatcttcacaccctggttttccttcctaggagagaagaggttgcagagagagaaggctgagcaagccctggaaaacccagaagacctaaggggtcccactcagttccctgtgttgaagcagggcagaagtccttacaagcgcagctttgatgagggagacatacaccctcaggcaaagaagaagaaaatagatctcatcttcaaggatgtgctagaggcctcactggagtctggtaacgtggaagcccgccagctggccctgagcacctccctggtcatccggaaagtccccaagtaccaggacgatgactatggtagagctgccctgacgcaaggcatctgcaggaccccgggggaaggggactggaaggtccctcaaagggtggccaaagagctgggcccactggaagatgaagaggaggagcctacatcattcaaggctgacagccctgcagaggcctctctggcatctgacccccatgagctgcctaccacctccttttgtcctaactgcattcgcctgaaaaagaaagtgcgggaattgcaggcggagctagacatgcttaagtctggaaagctgcctgagccctcccttctgccaccacaggtgcttgagctcccagagttctcagatcctgcaggtaagttcctcaggatgaggttgctgttaaagggaagagtgtgcagtgccactcgtgcgcactgtgtggagggtggcccagagcgctctgctctgtcacaaccacctgccaggagaccagaggaatgcaactcagcagaggcagccccctcttggggtgggagcccagtccctcaggtgacagaggcaggctggcttgaagatcgggggagggagggcattgcatgtgccaacctgtatatcctccttgtcaataaaatatgtcccatttgcaggagggctgtgtgctgtgttcttgacctggtgttttctcttgggggcggggcccactgttgtctcccctgacccaacttctctcttcccccagtctctgctgggagcttttacagctccccaaactcaggccaggagcacagcctcgtccacttcttccagactctgtcccacccacatggtgctctgttcccagcctggagttctagaaggatgaggaaccagagaacctggggccgacagctgtatgactgtccttttttgctggctgcctggatctcttcaagttgttggaccaaggaagaactgtggttcgattctgtgcagatttgcagctaagccgggctgtttccctcaggtttcccttctcagccaccctcagaatgggttggggtggacgtaaaaaccacattttgcctcaatatcgaggctgcccgcagttaagagccacatgctcaccctgaccatagcggtgggcattccagggccaggtcctccagtgtaacctgaatgtgtgacatcaaacattctgcctcttctaaaacattccaccccagaagcacccacaaatcaaaactgagctcaggtgcaggcagcgtggagcatagtgagtaacgtccaagaacaccatgggcaactcatggggagggaacctcactgtggagagtagagttacccttgactcaactccaggctgggcttccatctctgtggggcccgcgctccctcagaggcccttgctgagtctgtgctgtcaacagcccacgcgaacttctccttcccctcttattttccagcctcagagagtatggtctccggccccgccatcatggaggacgatgaccaggaagtggattctgcagatgaatctgtctccaacgacgtgatgacggcaaccgatgaaccctccaagatgtcctctgccacaggacgccgcatccggcgcttcaagcaggagtggctgaaaaagttctggttcctacggtactccccgaccctgaatgagatgtggtgtcacgtgtgccgccagtacacggttcagtcctcacgcacttccgctttcatcatcggctccaagcagtttaagatccacaccatcaagctgcacagccagagcaacctgcacaagaaatgcctgcagctgtacaaactgcgcatgcacccggagaagactgaggagatgtgccgcaacatgaccctgctcttcaacaccgcctaccacctggcgctggaggggaggccctacctcgacttccggcccctggcagagctgctgcggaagtgcgagctcaaggtggtggaccagtatatgaatgagggggactgccagatccttatccatcacatcgcccgggcactgagagaagacctggtggagcgcatccgtcagtcgccctgcctcagcatcatcctggatgggcagagtgacgaccttctggctgacacagtggccgtctatgtgcagtataccagcagtgatggacccccagccacagaattcctatccctgcaggagctaggcttctccagcacagaaagctatctccaagcactcgaccgggcctttgctgctctgggcatccgcttacaggacgagaagccaactgtgggcctgggagtggatggggccaacatcaccgccagcttgcgcgccagcatgttcatgaccatccgcaagacgcttccgtggctgctgtgcttgcccttcatggtgcaccggccccacctggagatcctggatgccatcagtgggaaagagctgccctgcctagaggagctggagaacaacttgaaacagctcctcagtttctaccgctactcaccacgcctcatgtgtgagctgcgctccacggcctccaccctgtgcgaggagaccgaattcctgggggacatccgtgccgtgaggtggatcattggtgagcagaatgtcttgaacgcccttatcaaggactacctggaagtggtggctcacctgaaggatgtcagcagccagacacagcgggctgacgcctcagccatagccctggccctgctgcagttcctcatggactaccaatccatgaagctcatctacttcctcctggacgtgatcgctgtgctgtcacgcctggcctacatcttccagggcgagtacctcctggtgtcacaggtggatgacaagatcgaggaggcaatccaggagatcagccggcttgcggactccccgggagagtacctgcaggaattcgaggagaatttccgagagagtttcaatgggatcgccgtgaagaacctcagggtggcagaagccaagttccagtccatcagagagaagatctgccagaagacacaggtcattctggctcagaggtttgactcccgaagccgggtctttgtgaaggcctgccaggtgttcgacttagcggcctggcccaggaacagcgaggagctcctgagctttggcaaggaggacatggttcagatcttcgaccacctggaagccattcctgccttctcccgggatgtgtgccgcgaagggacggacccccgggggagcctgctgatggagtggagagacctcaaggctgattactacaccaaaaatggcttcaaagacctcctcagccacatctgcaagtacaagcagaggtttccgctcttgaacaagatcattcaggtccttaaagttctccccacctccacagcctgctgcgagaaaggccggagcgccctccagcgggtccgcaaaaaccaccgctcccgcctgaccctggagcagctcagtgacctgttgacaattgctgtgaacggaccgcccatcgccaactttgatgccaagcgagccctggacagctggtttgaggagaagtctggcaatagctacacactgtcagccgaggtcctcagtaggatgtctgccttggagcagaagcccatgctgcatgtggtggaccatggctctgagttctacccagacatgtagggggcctgagctccagaggccacaaagccggtgaatatttttttaatctatactcataagctttgatatattatataaatatatattatattatatatacatatatatatatatatatataaacctacactgaaatttttttaaagactaagttaattatgtccaccagaagccactggcagctttcagaaaggagcaatgttggcaactgactcttgtctccgcacttggcagctgcagcctccacggcaactcatcctcacttacacgagcgtgttctggggccacacgtgttcccaccaaacagtcaaagcggcataagctaaatgatgattctcttgtcacttttaggtggcttcttctgtttctgttctcatgtgttggtagagggctgggggttgggtgcctgccttctccttttttggtatggttttgtggcgggggcggggggggcggtgaaactttgtggtctcctcattggcatcctggtccagttacattacatctgggtttccatgagggtgaattggatttctggactagactatctggtctttctcccctcacctgacttcagcttgggagatctttctttgttcattttctgattgattccttcccttgtcccaccgtcaaatggtcaaatgcatcaacctccctccgctgtgagccagctgcgttcccctcccacccccccccatgtcgccgctcccctgtgtcacctctgccaaccctaggttgtcagttcccttcttcaggcctctggagtttaaagatatgagctgttacactgaacgtaatttttttttcacatacgagcttgaaacttgggagtggagggagggtaagctttatgcctccccctttccagccgctggaggataaagtatatacttccattcatatcttgggctgttggggagacaatgagccacgagatctaaactcccaacaggaccatgattcttttggctaaatacaggtaaaatgaaaagtgtatattcaactttcacattgttttcatctttataattatgggatgtgttgtgggatttgtgtttcttttcataaccaaggagcagctgttttgtagttcaagggcagagcaatcaacgaaagtcatgccctgggctacccagaactcagagagtgcctagagaggtttttccttttgcaaaaggctgataatgtgttcctcagccttgcaggaaggtcacaggacaccaggcagtgcttctctgcctgtgaactcttcttattttgagtagagttgagatgtcctatagaataggagaaaacaggaaatgaggtgggattctcaaggtacaagcatgtatacatacctacacacacacacacacacacacacacacacacacaccacatgcacatacatgcacacacaccacatgcacacatacacacacaacacatgcacatacatgcacacacatgcacacacaccactcacacacataccacatgcacatacatgcacacacaccacatgcacacacacacacacaccacatgcacatacatgcacacacaccacacacactttgcaactacatataagctttagaaatgcctctcgcctccccccatagcggggaagagagtggtttaaactagaggagtctgaccaatgttcatttatctaccagtatacctcgcaaagagttttcagaaatgtgcatgagctgttaaaaacttctctctaatttccacatctgatctgtgtagtctgtgcagatctcagaatgtggatacagggttgtcttggggaagggaggaaggtctgaaggacctgcccatggtcagttctgcagagaactgtccctctccttcagtggagtattgggggttcaaccacaaggaaaggcccccgtaccctcaacctccctggtggggcctgcagctatggtagcttccttccttctgggtctgtctcacctctgaggcctaacagaaatgtcattaacactgaacacgttgctaccctttcctggttctgcagtctgtccgtcctccctcagagcctccctttgcctccatggtcttggtgctaagataaatttagaatcattgctgctagccaatagcttttcatgatataaatattatatatatatattatatattatttttgaaatgtttttgttttcaacagtgatgtagcatgttaaaacaagaaacaaaactgaacaaacgaaaatctgggtctttccaactgtcccactgccaggtctcttaatgctgccttcttcaacaagttgatacaccccacctggtgactttcacccctcatctcactctggtccccatcttaacccctcaccctctgagcagggagagttagcaggaactaggtaggaaaactcaaagccccttgcagaggcctgggaatcccccagcctcagcacccttgcccacgctgagtttgtgtctctcttcagctgcccctcctaccccggcccaagcctagctggagccacacgggcagctgttgcgaagcacaaggtctccacttgcctcgctcctgcctcaggaccccatctcctcacagacacagactttggtctgggacaattttattgaaaattgaataggccgaggtgggttcagagtagggatgggtggcaaggctggtctctcatgggcagcctgtaggcataaaccgtggcctgggcccttccttcttgccaacagttgccttacatctgtccttcccagtgcatggggctccctcacccaggaagggacctctcccagatggtcctaagccagacatgtaaaaccaggactgaccgtcccctcccaaggagctatagctgagtgaactcaggtcctcatccatagagacaggttctgccaggccaagccattgttacctgagtctcctcaagatacccaggatcagtggacctgtcttgaggcctagaagaatgagctgttctggcagtatcatgtggcttcagagtcacccatttccttggtcctctgtctcctcaaccccacctctgtcctctgctgcaatgacctctgcctcagagccactgagaagctgagctctacacgtgtcttctgctcagtctccgaaactctgggtgctggtgactgtgcagccaagcagggctgtgacagatgcaccatgggccactttgcctcgggatattgaatgactaagggacactgaggttgaaccccttgtagtcagcttggatgttccctgggagggtcagggcttctgcccagtgagttccatttgtgatgccctgtgatttcagacctgttcttatcctcctcttggagaagggcttgggtctgcccacccttcatgtctggcccgagaaccatatgcctggctcaccccatatcttggctgggttaacagactgtgggaaggtagggcttagagtgtatatgcagtcatttctgatgggacagggactgtaattcagtctctggagtagaactggtagtcacgggcatagaatgaaatgtatctgaggggctgagacttattctctctgggctggtagtggctttcattggttcacgttggtgagagtaagaagtgaggcagtgttgaagactgaggcttgtggccattgtgccaaatgggtaccttgctgaaacacagggttacagtgtgcccccccccccagcaaaggaaaacaatgaccactgagacaggtggaccactcagctgcgtgggcagctcctgcccagttagaatccctccagagacatcagagtgcgggcatcagaggtgccagagctattgttttataatgtctgcttgtggcatctccagctgccttaccccctcctcactggggaaggagagtgcactcagctccgggactctgtgtagttaagttctgcctggagccctgaatctgaggtcccagagcttctgccctctgctctggctgtgtgttcccagcctgcgttgttttgctgaggtttctgtttgacttgttcaagtcagatctttgattttgagcaaggaccttggagtgacttgaagcaccttttaaatgcctttcatttgtgtgaagggggaggggatgggggaaggtgtggagagggtgggtgtggccgaagagaggaagaaatggactttaagatgttacccagcctgagctggcggtcctttgctgcccccctggagccaggtgatgggggccaggagatgccggatgggttgaagtcttctagaacactcctttgttttttcatttctgcccccttggaaggcatcccaacctgttttcagtggatagtctgggttaaattctaacccggatttgtgcttttttttttctttttgtgatccatgcacctcatttggctgcaggccccaggttcactggagctcatgtgtgccctggatctcctctaagaagcagcccagccagactgggcatgcaacggaagcagggagaacagggcctctggagtgaggaaaggagggcagagccgacagttagggtgggatcacccctttacacactgccctggattccagcctgacggttcctcccttctttgagggggtggggaatgtgtgccgggtgtgcatggtcctcctactcggaggaatgctcttttctactcctctgttagtcagggtcactttaagagtctttgaggtaatctttgcatgttagtgagagggagaaaagtgctctctggagagaaaaatagtctggccctcctctcccatctagcactctctcccctccccccatcccttcaaatggtatcaccctagaaatacctatgcaatgcagtctccccaggaggctgtgcatggaggcaggggtatgtgcagtgtatcatactgatgctaaggcatatcaattgtatatacggacatatacagtacgtatacatgcagagtaagagagtaaatcacgtctatatatctataaataatatcctatatatttatacatttttatgttttaaatagatataaaaatagtctatagagctggaagggtggcggggaagcctggtgctgggttgggcttggggggaggagacagggctctggagaggaggtggggataatgcgcatcagaatgggttgctagccactgagatgggggcatctttcttggggtgttggagaggagggtggctgagcctgggctctctctccatgcactttctctcctttcctgccagcaaaggctgagattggaaggagatagccctgagctgcatgcaactgcagtaccctacctcccagcaccaccagcctgcacttagctgctcactgctgcttagcagtagggggttggacttggtccctgacccccagtgaagggacctcttgcacaaactccccaatacccgcccctatcaggagtgagcagcattgatggcaacgggaaaggggcacccgggacaaaccgtggtccagaacgatgtcagtcccatttcccaatgcctctgcctaccccctggaggccaagcctcccctgcctaccccctggaggccaagcctctgacacacagtcctggcctccttcacccatttaaccactgtctctagagcactgggagctggggagggcggcgtgcacttcaggtgcacttgatgcctttccccatccaaaggccccacctggtggaagagatatatctgcacactgacattttcaatggcaactcaaattcaggagcagggccttggcccacccgactctgcacagctgcagcagctgctggctgtactcaggacaatgttgtcccctcttcccaaaccaaccaagcagcccaaccacctccgctgtgtcagcaggtttaggtttagttcacaaacactgttctcattctgtgaccagatacccaaacccactctttctagggagggtatcttcttcagcttgtccccaggcaacacctcccccctcaagctgggtagggatgtctgtggtccctggaagtccagtcagcttgctcccagcatcctctattcccttctctctcctggaagttgacagggtctgatgacagatgccctccctgctctcgaggagcagcctgcctttgggctcctcagacacactcatttcccataccgagccttcgtaggtctctccctgcttctcctcaccatcctaccaacggacctcagtctccagcagaccagtcccataccacagttgagaccaggtctgctctgccaatgcccgtctccttgagccacagctagctgccaactgggctgaacacctcctagtgcctggctcagtagagttcaggaccaatggcccaagccttcctcccactacaatgggtcagagcttggccaggggataggcattcccagtagcaatcccacaatgcactgtacctcagagagagagagcatgccacagggcatctagtggaccagtctccatgcagaggaggcaacggctcacaatactgctcacgagaagacaaaggccaggctgtcctagggcatccctcagtctaccctttggcctctctggaagaaccagtaatctttttcagccctgatctctctcctcctctccacccccaagctgctgaaccatttttcatgtcaatcacaaagaaaaaaaaaagtgggggtggggggggactcctaggagcctattaccacatacatattaatatgttaatactttctttattaaaaacaattctcaatgttattatttggcagactgtgctttctagtacctgtgtgttggggctagaacactggatacaaatagagctatgctggtttataatctgtatgcagcgtctttccttttgtcacattatccttgtaatgtaagaagattattaataaaagcatttaaattgccaccccaagcttggctccttgcttctgtgacaggcctccataagtcgtgcataccctgtcaaagggctcaggtgtgggtttggaaggatcacaggtcctctttagctggtctctgccttctcccactatggcctcatttcccactgcagtccaattctggcaggaagcccctgagcatgtcaggtgggccaaagaagatatgactgaaaccgtgttaaacacctgcccccatgacactggccctgcaagaatcgctgtggggaagcatccagggcctctgcaaagccaatggctccagctctcttgcttacctgcatttggttgctctccatgagcgggcctgatccccacttagaaaagtcttagaactttgttgatagcactagggacagagggtgacaagcaagatcttttccacattttttaaggaaggtatttgacaggaatataggcagtattgtgaatgtagtcaaatacctctaagtgcaggtttatcctcttgagatgctgaggcctctgctctcagtccctatgcccctaacttcctcatagtggtcttccctcttcctgtctccttacttctgccttcttatcattagacatctgtcgttcagccaagaagcaccatcaccttgacagtggccaccaagcagctgttgtgtgatactatttatggagaagtgtgaacaaaagtcttctcaatccagatatagaaccaatagcagaccaaagtaagggtactatcaaagtccaacttggtgagccaatgagcttattggggctacttggagaaatatgagtgagagctttcttacaacaatatgggtaactcaaaggctgctacattaccaaaagcccattccaaggtgagtagtctcatgaaaaccagaaccctggccatctcttggtagcttgcatcaactcaacaagtaggacagcctactcttataatataacattggagagggaggagctttagaactctgattaagtttcagggacttcctgagacttatgagttgtttatttccagagtcttaagaagcctctctttagaacctctcaagtcctaatgagactctattcaggacgcattgtttcagttgctacacagtactctaccccttcctgccagctctttctgctctccttccattgt

SEQ ID NO: 1626 - DNA, 1367 bp, Mus musculus
tccccaggacagaatgactgagaacatgaaggagtgcttggcccacaccaaggcggctgtaggggacatggtgacagtagtgaagacagaggtctgctcaccactccgggaccaggagtatggccagccctgctctcggagactggagccatcttccatggaagttgaacccaagaaactgaagggaaagcgtgacctcattgtgaccaaaagcttccaacaagtggacttctggttctgtgagtcctgccaagagtacttcgtggatgaatgcccgaaccacggtccccccgtgtttgtgtctgacacgccagtgcctgtgggcatcccagatcgggcagccctcaccattcctcagggcatggaggtggtaaaggatgctggcggggagagcgacgtgcggtgtataaacgaggtcatccccaagggccacatctttggcccctatgaggggcagatctctacccaagacaagtcagctggcttcttctcatggctgattgtggacaagaacaaccgctacaagtccatagatgggtcggatgagaccaaggccaactggatgaggtacgtggtcatttcccgggaggagagggagcagaacctcctggcgttccagcacagcgagcgcatctacttccgggcatgccgagacatccggccaggagagcggctgcgggtctggtacagcgaggactacatgaagcgcctgcatagcatgtcccaggaaaccatccaccgcaacttagcccggggagagaagaggttgcagagagagaaggctgagcaagccctggaaaacccagaagacctaaggggtcccactcagttccctgtgttgaagcagggcagaagtccttacaagcgcagctttgatgagggagacatacaccctcaggcaaagaagaagaaaatagatctcatcttcaaggatgtgctagaggcctcactggagtctggtaacgtggaagcccgccagctggccctgagcacctccctggtcatccggaaagtccccaagtaccaggacgatgactatggtagagctgccctgacgcaaggcatctgcaggaccccgggggaaggggactggaaggtccctcaaagggtggccaaagagctgggcccactggaagatgaagaggaggagcctacatcattcaaggctgacagccctgcagaggcctctctggcatctgacccccatgagctgcctaccacctccttttgtcctaactgcattcgcctgaaaaagaaagtgcgggaattgcaggcggagctagacatgcttaagtctggaaagctgcctgagccctcccttctgccaccacaggtgcttgagctcccagagttctcagatcctgcag

SEQ ID NO: 1627 - DNA, 3504 bp, Mus musculus
atgactgagaacatgaaggagtgcttggcccacaccaaggcggctgtaggggacatggtgacagtagtgaagacagaggtctgctcaccactccgggaccaggagtatggccagccctgctctcggagactggagccatcttccatggaagttgaacccaagaaactgaagggaaagcgtgacctcattgtgaccaaaagcttccaacaagtggacttctggttctgtgagtcctgccaagagtacttcgtggatgaatgcccgaaccacggtccccccgtgtttgtgtctgacacgccagtgcctgtgggcatcccagatcgggcagccctcaccattcctcagggcatggaggtggtaaaggatgctggcggggagagcgacgtgcggtgtataaacgaggtcatccccaagggccacatctttggcccctatgaggggcagatctctacccaagacaagtcagctggcttcttctcatggctgattgtggacaagaacaaccgctacaagtccatagatgggtcggatgagaccaaggccaactggatgaggtacgtggtcatttcccgggaggagagggagcagaacctcctggcgttccagcacagcgagcgcatctacttccgggcatgccgagacatccggccaggagagcggctgcgggtctggtacagcgaggactacatgaagcgcctgcatagcatgtcccaggaaaccatccaccgcaacttagcccggggagagaagaggttgcagagagagaaggctgagcaagccctggaaaacccagaagacctaaggggtcccactcagttccctgtgttgaagcagggcagaagtccttacaagcgcagctttgatgagggagacatacaccctcaggcaaagaagaagaaaatagatctcatcttcaaggatgtgctagaggcctcactggagtctggtaacgtggaagcccgccagctggccctgagcacctccctggtcatccggaaagtccccaagtaccaggacgatgactatggtagagctgccctgacgcaaggcatctgcaggaccccgggggaaggggactggaaggtccctcaaagggtggccaaagagctgggcccactggaagatgaagaggaggagcctacatcattcaaggctgacagccctgcagaggcctctctggcatctgacccccatgagctgcctaccacctccttttgtcctaactgcattcgcctgaaaaagaaagtgcgggaattgcaggcggagctagacatgcttaagtctggaaagctgcctgagccctcccttctgccaccacaggtgcttgagctcccagagttctcagatcctgcaggtaagttcctcaggatgaggttgctgttaaagggaagagtggattctgcagatgaatctgtctccaacgacgtgatgacggcaaccgatgaaccctccaagatgtcctctgccacaggacgccgcatccggcgcttcaagcaggagtggctgaaaaagttctggttcctacggtactccccgaccctgaatgagatgtggtgtcacgtgtgccgccagtacacggttcagtcctcacgcacttccgctttcatcatcggctccaagcagtttaagatccacaccatcaagctgcacagccagagcaacctgcacaagaaatgcctgcagctgtacaaactgcgcatgcacccggagaagactgaggagatgtgccgcaacatgaccctgctcttcaacaccgcctaccacctggcgctggaggggaggccctacctcgacttccggcccctggcagagctgctgcggaagtgcgagctcaaggtggtggaccagtatatgaatgagggggactgccagatccttatccatcacatcgcccgggcactgagagaagacctggtggagcgcatccgtcagtcgccctgcctcagcatcatcctggatgggcagagtgacgaccttctggctgacacagtggccgtctatgtgcagtataccagcagtgatggacccccagccacagaattcctatccctgcaggagctaggcttctccagcacagaaagctatctccaagcactcgaccgggcctttgctgctctgggcatccgcttacaggacgagaagccaactgtgggcctgggagtggatggggccaacatcaccgccagcttgcgcgccagcatgttcatgaccatccgcaagacgcttccgtggctgctgtgcttgcccttcatggtgcaccggccccacctggagatcctggatgccatcagtgggaaagagctgccctgcctagaggagctggagaacaacttgaaacagctcctcagtttctaccgctactcaccacgcctcatgtgtgagctgcgctccacggcctccaccctgtgcgaggagaccgaattcctgggggacatccgtgccgtgaggtggatcattggtgagcagaatgtcttgaacgcccttatcaaggactacctggaagtggtggctcacctgaaggatgtcagcagccagacacagcgggctgacgcctcagccatagccctggccctgctgcagttcctcatggactaccaatccatgaagctcatctacttcctcctggacgtgatcgctgtgctgtcacgcctggcctacatcttccagggcgagtacctcctggtgtcacaggtggatgacaagatcgaggaggcaatccaggagatcagccggcttgcggactccccgggagagtacctgcaggaattcgaggagaatttccgagagagtttcaatgggatcgccgtgaagaacctcagggtggcagaagccaagttccagtccatcagagagaagatctgccagaagacacaggtcattctggctcagaggtttgactcccgaagccgggtctttgtgaaggcctgccaggtgttcgacttagcggcctggcccaggaacagcgaggagctcctgagctttggcaaggaggacatggttcagatcttcgaccacctggaagccattcctgccttctcccgggatgtgtgccgcgaagggacggacccccgggggagcctgctgatggagtggagagacctcaaggctgattactacaccaaaaatggcttcaaagacctcctcagccacatctgcaagtacaagcagaggtttccgctcttgaacaagatcattcaggtccttaaagttctccccacctccacagcctgctgcgagaaaggccggagcgccctccagcgggtccgcaaaaaccaccgctcccgcctgaccctggagcagctcagtgacctgttgacaattgctgtgaacggaccgcccatcgccaactttgatgccaagcgagccctggacagctggtttgaggagaagtctggcaatagctacacactgtcagccgaggtcctcagtaggatgtctgccttggagcagaagcccatgctgcatgtggtggaccatggctctgagttctacccagacatgtag

SEQ ID NO: 1628 - DNA, 63720 bp, Homo sapiens
aaccctgttgcagacaggcccaggcaataaagcagtgtaagaggaagtgcagaggtagcgtggatttcaggacctgttggttcagcacctcaaccgtgtcagttacagtttctgtctctgagatggttcccaacaccagccccttcttggattctccaacccaactgggtgtccaacaattcaattcaattcaattctgtaactatctagagctggtgcagaccccacaagataagagctcagttacacaagactgccctcaattcagacactggtcataagtcccaggggacttgtacctctgaccaacataaatccagggctcctacaaacccctttctcaggtgtgataattcacttgaataactcacaaagctcaggaaagtgatttacttactattactggtttacataaaggctacaactcaggaacggccagatggaagagctgtgcagggcaaggtgtagaggaagggacctggagcttccatgttctcgctggaccctccacccttccagcaccttgctgtgttcactaatccagaagttttctaaatctccttcaagagtcttcacagagcttcatctccagcccctcttcttgttgccagaggccagtggttgggattgaaagttccaaccttccaatcacgtgttctttctggtgactcagcctcatcctgaagctatctggggggtcccaccctcagtcatctcattagcataaactcaggtatgatccggtggggctccttatgaagcaccaaagacactcctataacccaggaaattccaaggttttaggagctctgttttattagccaggaaccagggacaaagaccaaatacagtcaacccctcctatccatgggcatccatggattcaaccagccatggctcaacagactttctccttgtgattattccctaaacgatacagtatagcagtgatttacatagcattaacattgtataaggcattataagtaatctagagatgatttaaagtatatgggaggatatccaaaggttatgtgcatatactatgctattttatatccaggacttgagcatccttggactttggtatcagagagggtcctggaaccaattcccctcagataccagggtgcaaatgaatgtgtgtttcttgtcctaccaccctgtccccctgctctgaggaactcgcttcatgctgaagatgcttcctgctggggtcctctgcaggacatggctcccatttgcaacaatggctgtgtgctttctccttctagtcatgaaataaaagcccttcccttccctttgatttggtcaaaataagtcaaatgtctgatcttggagggaaatgtcatgtgctgattaaaggccaggttcctgatccagtcattggggagggaggtggcattgctagaattggcttagatgaacctgagcccagccctggtgctgggcaaaggctcggtgtctctgaatctcacttagttggtcctataagggaggtgtggcacctgaacaaagtccaacttccagtggggagtaatgaggtaacggataccatagaagccaccagcaggatccactgtgagaagcaaacacataaaaaagttctggctgggcgcggtagctcacgcctgtaatcccagcactttaggaggctgaggcaggtgaatcacctgaggtcaggagttcaagaccaacctggtcaacatgatgaaaccctgtctctactaaaaatccaaaaattagctgggcgtggtggcgcacggctgtaatcccagctactcgggaggctgaggcaggagaatcgcttgaacccgggaggcggaggttgcagtgagccgagatcacgccactgcattccagcctggacaacaagagagaaacaccgcgtcaaaaaaaaaaaaaaaaaaaagttctgcgggagggaccgccttgggagaatgtgttccaccagccctggccagctatacccatgatgcttagtggcgactgccctgtgggtaaaagctcaaaacctcattttccatgaccccagcaggagcctccactggctggaccccagttcctgcggctgcaaaatcagggactggacagggttagaggtccccatatgggagttccttgccctcaggaggctccagcagatggtttttctttatgtttattaacatatatatattcagaaaagtgcacatattgtaaaagctggctgagtatatttccacaaacttattatacccatgggatgagcacccagatgaagaaatagaacatggccagaatcttagaactccttttcctgcctttttccagttattcccaagaataaccacaaacttcacctctaacaccatagttgtggctggttggttttttttggtaactctatttaaatggaatcatacagtatgagtctgtactctttgggggtctcctttcttttcttggcattatcactcatccagattatagcatgtagttgtagtttgtctattctcatttctgcatagtattctatccactgaatttggtgaatattgtacagtatcctatgatcaggtaggacaagtgaacaaacatgtcaaatttctttgcttttgcttaggatgacggccgctaaccagtgtattaactctgcttatcatgcaccctgtgtgtatacaaagaactaggaagatgaattaattattacctaatgcatgcagtctttttagtagacatgatcttccaaaatgggaatcctaaacaaaaataaaaacaggtatgcttcgggtagagatatgggggtccttaccgattgattgattcattgagtcattgattcattcgttcatcaaatatgcatcaagcgccacttgtgtgcctgatactcagtctctaatctggattcctcctttctcctaaccaattggcaggatctcagcatctaatgacaagtgggtaaaggtcattggaattatcttctttagcaatttctaaactaaatgattatgaagaggtcctctaaagaatatttaagtgactatttttcagaagcaaaaagaagaaaacagaaatacacaaccctcctcctgaactaaccactagtgataccttaaaatatatcctcccagacccatgtgtacagatctgcatcattatgtatagactttaagtggaattattttgtacacctgtgtagtgtgggaaattaaaagtgttttaatggaattattttgtatctatcttttcatagctttcattaacaaaatccttgttttttagagcagttttaggttcacagcaaaactgagcagaaactagagttccccatacaccctgcccccacacacatccagcttcccggttattaacatcccacaccaaagtggaacatttgttacaattgatcaacctccattgaaacatcgttatcaaccaaagtccatagtttacattagggttcactcatggtgttgtaccttctgtgggttttgaccaatgtacaatgacatgtgccttccattgtagtatcatacagagtaattttactgcctaaaaatcctctatattccacctatttgttcctctctccccgcaacccctgccaacctctgatctttttacagccttcgtgattttgccttttccagaatgtcatatagttggaatcatacagtatgtacccttttcaggttggcatctttcacataataacttgcattatcatttagcaatatgttgaacgtgtgttttcatgtcaataaatattcctctacagcattgttaattgctgtctattatttcattgtatgctaatatttcattgtgatatagcatagcaatttcccccattttggaggtttaaattctttcctattttttgcttttaaaaataatattgcagaggacagctttgtaggtaaatctttgcacgcaatttaaatacatccttaggatccattcctggatgtgggcttgctcctacaaagggtttacttactttgaggattttgatacatgtgccaaattaccctccagaaaggttacaccaatttacactccaaccagtgggatatgaagtactaatttcccctacactcttgccaactctgaataacatcaagatttttcatctttgccaatttattagaggagaaatgatatttatttgttttaatttgtatttatttgagtattaatgtcttcatggttttccttaaagcatattagccatctattggtctttgcagattgcttgttcatgttttctttttatccatttttttttctattgaggtaagcatcttcagagcatatatttataaaaagtatttattaggggtattcactgcttgtaaaggccctcttctaatgtcaaacaatttttggccgggtgtggtagctcatgcctgtaatcccagcacggatcccagggcagatcacctgaggtcaggagttcgagaccagtgtggccaacatggtgaaaccctgtctctactaaaaaaatacaaaaaattaggcaggtgtggtggcaggtacctgtaatcccagttattggggaggctgagacaggagaatcgcttgaacccaggaggcagaagttgcaatgagccgagatcgtgccattgtactccagcctgatcgacagagcgagactcaatctaaaaaaacagaaatttcaccaccatgtgcacatctgatgtctgttatacttttaaatattaataaaatgaatgataatatttatagggtacttacgataggtcaggcattatgctgtgttaaacagccctatgagataggttctgatatcagtgccacaggacggatggggaaaccaggtaggcgtggttaatgcagtttctcaaggttacacagtttgtgagtggctgtgctggtgttaattgattaacaaaatacatggtgacataaggtttctatgaattcaataacacttttaaatacatttatcttttgtgttcatcacaaaagtattcatttgcaaatctgtcttatacatgtaagtttaaggcatatatttatgttctctataggcatgcttgctgagaatataaattcaataactccctataataattccaagcccttgcccacctctcacatggtatactgttaaggactatgagttggaccttttattttacaggaaagagaaactgagggcaaggcagaaactttatcagggtcacctaaaaaactgacagcacagccagaactgagacccagggcttgggattcccagcccaagtcaaggtcagcatgtggcttgggccagcaccctaacctcatgtccttttggtatcaatgggaacaacagagatgctgtggtaggtaccagagtaaaccttctagattctcatggtgccagcctctagggaaaccaagtgggcacagatccccagtcccctggctacactggctcctgggcattccaggatcctggcaccctgccaagggtgaaaacagagctgcagactcctgggctgcattctgcccccttcttttgggtttgcagctcactgctgggtttgcaacaagcctaatctctgcatgtgcagacttagaggagccagctgagagggagcattgccagcagcttggaatcctccatgaagcctgccgaccccccttcccccaagacttttgctgggcaggtaggactagagcattcttcagaaaaggcaacaggggctttacctgggccaggccttagagtgtctgctgagatggactcagtgaaggacaccagcacatgttctccctctctctctccccagtggaagttcatttggtcctgccacatcccatcttctccctccctgtccctatggcctttatcacaagcacaaaagtctgtctatttcaaagtagagatgtctatgggccacttgagagttggaatgcacattagtcctttgaggcttgatcctggttctccgggcagccagctccaagagtagaaagaaattatatgtgcatatagtcaataaataggtgtcagataataaggactcggtaactcattatgtttccctttatgctttggctgccaggaggctcagaattgaatgaagaactcaatcactaacccttttacaacagattcccggcataaccaacacccctctttctccatgaggcctctaacactatctctggttgtttcttaactgtcctgtttagtatgtgtttgttttataaaacattgcaaatcttttgtgtggtgaaggtgggatgtgagagataggacataaatgcaaatggcccacagatgtctctactttgagatacaaagtaatactttgcccacagggggtggtttgctgggaatgatttaagacaggaaaacgtttatatgcctcggtccttctctttcaatctcccttcccctcctcatcttctcttttctcccttctctcctccttctctccctgtcttaccctccgtcctttattctcttactattgcctatcctccctccaaaccccttccgcatccctctgtgccctcctcgtttattcctaatggggaccacctcctcctggcaagtatcagtatttccattttgcaaaagaagacactaaggccctagaaagtgtaagtgacgtgccatggccacactgattatcctccccaacttatcgtcagaatccggctctgagtctcatgagtctaattccatcctaccccctagtgctccatcctaccccccagtgcacctctgcacccttcagtgcccaccctgccagcatctctcactacctgctctgcctggcggagatcactggaagagagctccatagggaatcaaacccccaccctgtttttcctgctgacgtctctttcagagttgagattcccaatgggaccagtgggacacatcagagggaccagtgagatatgaaggggaacatttggtgaatatttactgagaatatgctgtgtgctgggcaaagtggagagtcagccaagcaaggttctcagggtgcaaaattgaaagaggttctcactctcaggtgccagtcctgcaagcgtatgaccctcagagtgaaagcctcctagtacctggcttgtctttccctagtcttggccctggtgccaggcactgttacaggtgctggcagttcaatggtggcctgcaccctgtcctcggggagcttacagtctattaagggaaacagatattaatcaagtaatcctgctaacaaaagacggttatacatgtcacactgccatgaagtgtgacatggggctaggagagggtgtttttggtggcagttggaggggggcagtgaggtctgaagtctggataggagttccccaggtgttctgcaggctaggactcagcaagttcacaggccccatggcaggatggagaatggcatacaggtggggcttgtggagggcagaggggccagagcaagggagccccatgcaaagcagtcctcagcagtccgttccaataaagcgtcagagtttccaaatgactgacttaaaaaaaataaatcccagccaatggagagaatttgaagccaccccttgatgatgtcactagcactcatcttcctgatcagcattctttagtgggatgtgcagagactggcccctccacactcgtctgtgtccacggaatacagctatgtctgtgatagaatctattattagccacattttctagatgaagaaatgagaacacagagaagttagataacctgctgtattagtcatctcaggctgccatgacaaaataccgtagatgggggtgcttaaacaacagccatttatttctcacggttttagagcctaggaagtccaagatcagaatgccagcctattggttcctggtggtggcactccgccttgtggatggctgccttctggatgtgtcctcatggtggagagggccctggtgtgtcttcctctccttataagggcacctaacccttatgacctcaattaatcttgatcacctcctcacagccccatctgcaaatacagatactctggggctgagggcttcaacatatgaaggggagtggggtccataacacctgcccaggatcacaccgcccatcagtgggatttgaactcaggcactgcctgtccagtgcccaggcacctaaccactgaggctccgccccaggatgtatggtggggggtactgcccatcccagtgagagttcctcagggcagcaggtgttcagggatccttcacaaatccacagggccttgctcccacctggcagctggacttctgagctgggacctgaacccacttaagggtgatcccagcgattgttcggtagaggactggactgaggatactgcatggtgaagccaacttgaaacacttgaatctgggggttcagccagtttccaatttactaagcagccatcgggtgtggtctgcatgaccttcggcaagtcgcttgacatcttccaggccccaattcctgcgccctcacaggaggcagggggccatcccacaggctttgaggtcggtcgagcacccagcggggagtccctggcataacgcagccaggaggcagtagagtggcaggcgccccaggcggtgcaggtgcggccgcggctgagcgagcgggtgtccggtgtccgcacgggtggcagcgcaggccctgtcgtcgccgccacaccaaggcagctcggaggctggggacacccgcccggcctccgcggcgctgtcgcccagccctggcaccccccgggccgagtgcgcatcgggccccgtgggaggccctggaatgcgtccaccgcctgacccggagcgaccccccgcggcgccctctcccaccgccccgcccgggcgcccgcttcctcccgctccctgcgcgcccccctcccggccgccagccaactgcgtgcccccagggccggcaagaagccacatgcccccgcaaggaatgccgggcctggcgggcggggggcgggcgctgggcagggccgggcgggccgggccgggcagggagctccccgccgggaaggctggcgagagggggagagcccgcccgcgcccgccccggccgcagcctacaccggcccgagacggggcggccacggggcagggggcggcgcgcccggcctgggcagccctccccttccccaccgcgcgcccccggccctgctggctcggaggagggggcaggccgtcacgtttccccgcacccctcccagtcgccgccgccggctttggggccccggtggggagcagggggctgattagccgaggagcaggggtgtggccagcggggccccgggtagtgagtcacacacgccgctcgcccagtcccagggcccagcgccgtcccagccccaggctgcgtgccaccctcgccccgaagagtgtccccgggcttggcatgaggaccccggggtgccgagggaggggctgaagcccggcgcggtggtggagggcggtaagcggcgggctggggagtgtccccttgagagagtcgggtggggctggagccctggctggccctcgccagcgcccccaggccctgcctgtacctgctctgagctggcaaaggggcctggctgcgctcccggcagtcccagggtgaggggctgccctgccaggcgctgagggcccgttcggtctgcccactaccccttggcccaagttgggcttgagttgtgaaccctcccttctcgccctttgcagttttgcgcccaggctcatgtgggatcctcctgccctttgccctttggtctaggggtccaggctatgcttcccagcgcggcctcctggcctgagctgctctaggctcctgaccccatggggctggtggctccagtcgtccccaggaccagcccgggatagaaacggcatttcctcttggccgggctacagctgtttttgttgtctgtgttctcaagtgcttcctctggggatggcagggagggtaaccagactccgcgagacccccacttgccctctccgccgctcactcctcttcccctgtttctttgatcctcttcctgtgctggtcccacctcctgcgtcccaggacagaatgaccgagaacatgaaggagtgcttggcccagaccaatgcagccgtgggggatatggtgacggtggtgaagacggaggtctgctcaccactccgagaccaggagtatggccagccctggtgaggcccctgtgtgggaactggagagggagaagtgggagtgggaggtgcctgggctcggttggttgggaaccctgggaaacgttctcactccttgcccaccttccctaaccctgctcccggcagctcctgggcgcaggctctagaaaaatccaagcagtggcctagggaggtctgtgctcgcatctcaatcctccagtttttccaccacctcctgcactgaacagcaggctggctgggactcctctgcccaccccacatcttctcggtctcctggccaggtccccagcttttgtccccactgggctctcactctctgatgacttctttgctttctttgcgggcctctgccctggccagctctaggagaccggactcctcggccatggaagttgagcccaagaaactgaaggggaagcgcgacctcatcgtgcccaaaagcttccagcaagtggacttctggtgtaagtggagcttggggctctgggctgctcctcccttcacccccatcgccccattcctggctagggaattcacaacaatgctactaagataggtcctcacctgcaatataccaggcccaggtccaggccttggttcgtcatcatcattagccatccaaatggctattgttggccccattttccagatagcacactgagtcttggtgagggttaagtatcccacgcctcgagtcctctggcccaaaggggtacagttgcacttggactccaaagccatgctctttcttccagttttttaaaacttgagacaaaggtagctgctggcctccttgacgtaggcaggcctgttcttggagcccccagggagagtatgggttattgctaccgatgaccctggggcctgcagctggctgtccatgagtgggcctcctgtcagcccctctacctcccccatgggggtcttacctccctgcaacaactgaggccctcccttctctttccatccctccagtctgtgagtcctgccaggagtacttcgtggatgaatgcccaaaccatggccccccggtgtttgtgtctgacacaccggtgcccgtgggcatcccagaccgggcggcgctcaccatcccacagggcatggaggtggtcaaggacactagtggagagagtgacgtgcgatgtgtaaacgaggtcatccccaagggccacatcttcggcccctatgaggggcagatctccacccaggacaaatcagctggcttcttctcctggctggtgagtgtgccctgggctattcatgggagaggttgccaagaaacatggaaggaaaccaccagggggagccatactggcccagcttggccccagaacttttctaccatcgcttctggacctgtcgatgatggatcttgctgtcccctggccccggctgagtggctgcaacgcttggtgtccaagggcaatgctgagagcacccacctggcagtagtcagcagatcaggaaatcaccaagcagaactcagggcaatttccccatgaatcctcatgtgtgtgtctggtggaccattgggcagtattgaaccaaccgatcttctagagtgggtgactcggagctggcctttggggatgcagagcatgacttcccacttccaaaccagtaatatcaggctctgggctaggtgctgggggtaaacccttcaacaagacagacatggttcctgccctcagggagcagacgatctggtaggaagacaggcattgaacaagcaggtacacatgtgatatcagttgcaacacagggtactatcaatagatgggttgcaaagatgaggaagaggggttttcaagggtatgaggaggaagggttaccaaagcaactttaaggaatcatgcttgagctactagacagagataggggagggtggggtaatagagaaaagcattctagagggtaagaagatccttattcactacaaaaacacttcttgagtatctcctttgtgccaggcactgggctggccctggaaatacagtggtgggccagataaggcaatcagataaatcctgccttcatggagttctctgtgggaaagatagaattaatcaaagactaagacaaatccatgtcaaataataactctgagggtgatggagaaacagtgagactgggaaaaagtgaacaaccaggggaggtaatatgggtagaggtcagagaagccttcctgctagttgagctgtgattgaaggaggtgaatgcctaccaggtgaagattggagaggtgcatccagatgccttggacagcaagagcaaaggccctgtggcaggagagcatggtacatctgagctactggatgaaggtcagtgtgcctggagtgcagcacacacaggggcctggagatgatggaggcttgattttgtagggcccagtggaccaaattaggacttctgtccttttaataatgtaggagttgggggagtgacttggtcacatttatgttttgaaaagatgactttggctacagcctggagaactgattgagctcaggggtgctggtcaagaatgggtacccacacccctttccccaggtagagcgtgtgggagttctgtagtcggcaatggtggaagactgggctagggttggggcaaagacttggagccaaacgaactgctttgtgaactgtatcagagaggagagctctgacttagacatagactaactggcctaaggaagggagcaggaggtatcaaggacatctgcagtctcccaacaggttgttaatggtgtctttctctgagaaatggaggaggctggaaggggactgggttgagggaaaaatcatgatttgggtttgggacttgttgagtttggagtaacaacaagatatccaagtggtgatgtcaagtaggcagttggatatatgggtccgaagcttggagaggaggcttggagatgttgcttagtgagtcacctgtgcatgggtggtcagtgggggtgtgggtgtggagcgcagaacctagggagaatgtgctgagtgaaaggtggaaaggcctgtgagcaagctttgagggactttagcagttcatggtctagaaggggagcttgatcctgcaaaggagacagagaaggtttgcagccagagaggtaggagggaaaccaggagagtgggtgacctggaagtcaggggagaagagaggttctccaggccacaatggctgtcagtgccaagtgctgctgagaaaccagccagaaagactgaaaagtgtcccgtggatttactaccagggaagccatgggtgactttagcaagagctattgtagaaagcagtgggtctgaacctgaggcaattttgcagcccagcctcctgtccccggacattgggcaatgtctggagaccttttggttgtcacagctcagcataggggtaagctgctggcatctagcagttggagaccaggattactgtaaacattttacaatggacagaatagtccctcataacaaagagttatctgcagaaaccctgctggagagtgatgggggtggaacctgattagcatggaggtgaccaggcatagtcatttcctagaagtttggttacagataagatcagaagtggaggagaaagataagagtgaggtgggagggtgtgtggtcaagagagtttgttcattagaaagactttagcatcctcaaaaagccaagggaggggttctgctgaagtgcttgagtgtagagtagagataaggcatgattcctaaccttttacatcacctcagagggttcacatggagatactggacaaaaaagggggtggatcagcatcatttctgtccctacagggttagcccagaggattagagcagatagagatagttaggtatagtaggccacataatgtccccccaaaaatgtccctgtcctaatccctagaacttgtaaatatactatcttcatggcagaagggattttttgcacatgtgattaagttaaggatcttgagatgggagcgatgatcttggattacctgggtgggcccagtgtaatcacaggcatcttaataagagggaggtgggaggctcagagtcagagagaaagggattggaggatgctgctctgctggccttcgagatagagtaaggagccgggagtcaagggatgcaggcagcttctggaagccagaaaagtcaaagaaacacattaattcccagagcttcctgaaagaatgtggccctgccaacaccttgattgtaggacttctgacctctagaactataaggtaatacatgtgtgttgttttaagccactgtggttttggcagtttattggcaatttattacaggagcaacagggaactcatataggaggcttttatgtttgtggggggacatctactaaaatatgcagggaggtggattgaggtggcctgaaatcgaggagatcagagaaggtgagttctgcttgggatgagtagagttcctggtgcccgtgagatgctcaggggagctgtccagagcactctggtgtgtgtggctctgcagtagagagatgctgggatgacagggaaaactaagtatataaattaatgcagctgaagcccggagaagggagggcatttcctacagaaaaggtgcttggggaggagagaagaggcatttcctttggaatatgagtttgaggaatccttggagggagaggagttgaggaggcatggagcagtaggaggagacagtaggaagtctccttggcccccttggcaggagcagtctcatgggcggaagccagattgccatggattaaggtgtcagtgggaggtgaggaaagggaactagcaagggtgcatggcttgttttaaaagtctggttgcccactgagcaattattatatgccaggtgcatactggacacctctggcatctcatactcttcctcgaaacagtccatagggtgggggttgctgcccctcttgttctgacgaggaaacacaggactcccacagctggtccacagtagaccttgggttccttcaaagatagtgtccctccaccatgtgaggacttcccttattgggagacattgctaatggggtggagcagttaatagctaccctgagccagttttggttatgtgtccaggttcaacccaacctcacatacacagagcaactccagagcactaggtcctgagcagggagctctggggataacagggctgcgtgaggtttgctgtctgttcttatggagcctgtggttcagttatgaggagcaggggccatggtggataggaggggaggaagcttattcccaaccaagtaatacagaggcagagtattgcttggtgatcgcagtgctgcagagggctgtagcagtagggagagggggattggtttcaacagggcagattggagatggatcttgtcttgaaggatggatagacgttcaacagaggaagcctatggcttcacagcctattggaaaattgcaggagaaaaaatctaggactgtgcccaaggaatggctattaggatccctttctgcagctgctagagtctgtaccttgggacagcccagccatggaaagttgagaatctttaaagcagatgaactttcccaggttggctgcctggcacaggtctacggtgagaagaaaggaggaatagaaggccctggtgtttgcaacctggttctagactagctccaccagtcacgagtaggcgtggccccagttcaggaggtgggactggtggcctggaggttattccctctgaggtttcttcctagggccttagctgcagccagcagccagcagccagcagccagcagatgggcacagggaggcagtggttagaggctgcaaggccatatgggggctttgacctttgggaacccaagaggtgagagacattgaaggcctagagccaccagatgcttaaagtggctcaagaaaagttcgtgtgtgtgtgtgtgtgtgtgtgtgtgtgtgtatgtgtgtgttgggcatgggtttttggcctccactggggaaaagcaggcgtgaagaacggctctgcctgctctgctgatgggtaggccaaatggtgggagagtacggggaaggtggggtgaacagtggtgctgatttttggaccaagatctagaagccccatatcctaaataaactgccctcatttgtcaagtcctgtcccaaagccatactggatatcatcttctttggaccttctgcctgcctgcaaaagctctggcccccattcagcacaacacatttccctccacactccctccctcagtatatgcactctactctgtagaaatgatggtggtggtcatgacaagcatagctgttaatgtttattgagcacttactatgtgtctgggtctgtgctcagtgctttatagcataatctcatctgatcctaacaacgctcctgtgacataggtattattccatccattgcacagctgagaaaactgaggcctggagaggatgagtcattctgcacaaagctaaacagctggtgagtcactgagctggggttcaaacctgtgcagtctgactccagaacctaccctctcattccgcctcttggccctctagcctcccttacttagcacgcctcttcttacctccttgcctgggtagactctattctactcattcttcctgcccagcacaagttccctctttgtcttcgcttaacctggaggaaagctggcctgactttgggcagagtggtacaaggcatgggcctgggtcataatggaccgaatggccatttccactccacaactctccttcgtggcctggctgacttggcaggagttggacactcacctctgcctgtctaggaaagacatgccccttgctctgctttttcatcctattggaaattataaatgctgtgattcattgccaagatcacccaggctaccctcagacactgcaggccaggaaccatgctgctggcacgaggcatttgggggtgctgcgcagccatgtggtttggtaaagaggcagaagacagaggaagccaacatgggattttttgtttgtttgtttttttgtttgtttgagatggagttttgctctcgttacccaggctggagtgcagtggtacgatctcagctcaccgcaacctctgcctcctgggttcaagcaattctcctgcctcagcctccctagtagctgggattacaggcatgcgccaccacatccagctaattttgtatttttagtagagacggggtttctccatgttggccaggctggtcttgaactcccgacctcaagtgatccgcccacctcagcctcccaaagtgctgggattacaggcttgagccaccacacccggccgcgagcacagggtttctatgtaagtttttcgttcagaccttggcttgttccagaagggatttagggtagcctagcagtatacataaaatataccacaatggcatattaaaactgggagagagaaagaagaaaggaaaacaagggtggagaccctaagtgaagccaggaatgaagctaaaaatgcatactataatgacctctatctgcacttttagctatacaggctccaaatctggcagccactgggagagtagctggtacattctgtccataatgtgaaaaggaccagggagctcctgaggaggtccgcccttctgggcgctgatactggataggtttcccaggggcccttataaagaggacactgtgtggtggaattgtccactccatgcgaggcagcctccccacctgccagactgctaccgttctggggagaagcagatatgaaatggtgttttagtgtttcccatttcagcttttatagtaaattgacaatttcttttaaaacttgaaagtggacgtgccagagctcatggcacatcctccagaaaagcctctgagagaccctgagtgcttagctagatgaaataagcagacagttgcagtgccatgacatgtggtggggacaggcaggtgttaccaagttcggggatgctcagagaagtgaggagtaacaggtttgttcgagaagaaagaaaaggggcgtttgagacagggtagtcgtgcagtgtgtgagcatgcacgagcaggtgcttttcatgcttgcttgttaatttctactctttattttgaaagttgcaaactcggttgaaaagttgcaagaatagtgtaatgaataccctcacacctgcctgtagattcatctattgctaacactttatacccattgctttatctcactttctacacttacaccacctacacacacacgtgcacacacacacacactttttttttttttcttgagatggagtctcactctatcacccaggctggagtgcagtggcatgatctcagctcactgcaacctccacctcacaggttcaagcaattttaccaccccagcctcccaagtagctgggactacaggcgcacaccaccatgtctggttaatttttttgtattttagtagagatggggttttactgtgttacccaggctggtcgcaaactcctgagctcaggcaatctgcccgcctcggcttcccaaagtgctgggattacaggcatgagccaccgcgcccggccatacattctttttttttttttttctgaactgtttgagatatagttacagagacatcatgacactttacctcaaaacacttcagccaaattcctaagagcaaggtgttcttctataccagggtgagcaaacttttttttttttaaaggctacctggtaaatactttcggctttatggactgtgcagcctctgtcataactactccactctgcctttgcactgcaaaagcagtcatagatgatacatgaatgaatgagtgttgctatgtttcaataaaactttatatgaacactgaaatttgaattgcatattatttcaaatgaaatttgaaagtcatagaaataaaattacataaaaataattttttagtcattaaaaaaatgcaacatgattcttagcttgcaggctgtataaaaacagacaatgggggctggatttgacctacagccatagttggctgacccctgagctatttaaccaccatataatgattacacccaggaaatttgacatggatacaatactgtctcagctatagttcgtattcagatttccctaattgccattagtaacatcctttgtggttttttccccatccaggacccgtgcaggtatcacacattgcatttagttgtcacatctcattagtctcctttattctagaaaagtctcccctgtattgttttttttcttcatgatattgatacttttgaaaagttcaggctagttgtttgcataatgttccacagtttagatttgtctgattgtttcttcatggtggattccgattacagctttttggcacaagcaatgttaggtctttctcacggtgtgccatcaggaggcacctggtggcagtttgtcttgtcttttactcaatggttttaacaactattgatgattcttgtctgtatcaattattattcatggttaaaatgatttttctattttttctcttctacatttattatttgacattcttctgtttaaaaaagatagtgctcaaccttcacccccactcaatcctcatttaaagctatttttagtattcatatgaacatgaattctttttttattcaatgtgttggaatccatgtctgtcattattcattttgatgtttaaattgccctagatttggccagtgggaacgctttcaaactggctccttgttcttttgacacatccccatcattattttagcactttttccttactttctggcacaaaaagatattcccactgtctctcgtaggagctgtgattcctttcagtgggaaatggtgtttaggagccaaaatctctgaatggtaggtgtgcaattgctactggggtgtccttgcttctaagccaaactaggttttattattattattattattattactattattattattttattttactttgagttctgggatacatgtgcagaacctgcaggtttattacattggtatacatgtgccatggtggtttgctgtacctaacaacccgtcatctaggttttaagcctcccatacattaggtatttgtcttaatgctctccctcccctcacctcccacccccgcaacaggccgccgtgtgtgactttcccctccctgtgtccatgtgttctcattagccaaactaggttttgagggagggatggatgagttgatgcaaatgtcctaccatgtcagaaactgagggaacgcagcatagcagtggtcatggaatttacaaaggccctggggcacacacgtaacagtcaggtggggatggtattaatattagggtataacagaggtaccaagtgtgtttagaaggaaaagtggaagatgagactagagtgaaagtcacttttcttgtgttctcagatgcaatggatcataaaacactgttgattcaatatcagcttttccaggagtaaaaatgaatacctcaatccaaagattctgaatatcagaagcattaaatgggctcagcttgtgtagctgttttataagtgctggtagtttagttattgaatcacaaaccaaaccaaagatttccccaggaaaatgtaatatgctcatgaaccagttctggctggagccaagtctgtacatctattgtatcagagcaaaagtagaacatgaaaaattattctgaacctgtataatatttccagtacagaccagctcctaacctgacctcctctatttcttggctttccagtccattctactgtagctgtgtttctcacacctgaacagtgttaagttcaggtgatttttaatgttcctggagtcttcatgttacattaattttattttcatgttacttaaaaaggtataaacatatagcttggtaaacacaaagtgtcttgtacttataacttttaaacaactgtaaagccaaaacaagtttacacatataaaattaactacaaaaacctcaacataatacacattaacaaagtcattctaatgggatagttgatgatgtgtcactgaaacaaaattgctatttataaggcgaatatcgtagtgactactgagacacagcaagagtctttggagtttggaatgcctgtacttttgtgttcagtgtgatatctttactttcctactatttgtctctatttgaaacactgggaaatcttttatttatgtatgtatttatttatttagaaatgggaacttactctattgcccaggctgagtgcaatggcaagatcatagctcactataacctcaaactcctggacttaagccatcctcctgcctcagcctccagagtagctgcgatcacaggagtgtgccatcacacccatctatctttgttattgcaactgccatgatgtgtcttggcctttgctttgccggagtgcaacatttacatattaagtttatatctgttctttttttgttggctcatagcaagtagtcataattggggttgtatggtcaactgttggggtaaaacaagctacctaaaaacccagtggcatagaacaagggtcagcaagtgttctctgtaaagggctagatagtgaatattttaggttttgcacactatacagtgtctgtctcaatgactcaattctgccatcatggtgcaaaagcagccatcagtgtgccatgttccaataaaagtttatttatatatagtgaagtttgaattccatataattttcacatcatgaaatattgtttttctcttgatttattttcaacaatttaaaaatcattcttagcctggtgggccatgcagaaacaggtggtgggctggaattagcccacaagccgtagtttgctgagccctgacatagaacgacaatcatttactcttgctcacgtatctgctggtcagctgccgttcctcatttctacttgtgtatctgctggttggctgcagtttggctgacatagctgggcttgctgggctgcccggactccagctgctgggggttcttggcttctctctctggagccaggtctgctccagacacttggagcatgtctgttctgggccccagctgaaggagcaagggctccctgggggagcttttctacattttgaggctttgctcatatcatgtttgctaatatctcattggctacatcaatttcacagttgaacgtaaggtcaaggagcaaagaagtgcaggctgcctgttaaacagtctagttcagaatcctgtggcaaaaggtggtacggatggctgaagagctggggccagggattcaatctgacacggatgccacctcagccataaattcagtactcttgcgggtgcagaaatctcatgaggattcccgcatattgatttttttaaatgaaaacatggaattaaaaattcttagagaaaacattcagatcctgagaatatatccaaagaccctagtttgagagacactaatttttagtaaacttcctggctttgccgcagaagatttggggtttcttggtgtttgaaaattccccaaggagagctcttgttgaactaggctctctgaacctaattcagcactccaaaccccagtgggtcctccaaagatgctagttagggttgatgaacaacaataacaacaataatagtagtaacaataatagctgctgttcactgagtactaaatgatttgtatatctcacaacagtactgtgggatagttattatcttctttttttttttttttttttttttttgagacggagtctcgctgtgtcgcccaggctggagtgcagtggcgggatctcggctcactgcaagctccgcctcccgggttcacgccattctcctgcctcagcctcccaagtagctgggactacaggcgcccgccactacgcccggctaattttttgtatttttagtagagacggggtttcaccgttttagccgggatggtctcgatctcctgacctcgtgatccgcccgcctcggcctcccaaagtgctgggattacaggcgtgagccaccgcgcccggccagttattatcttctttttaaagattgggaaactggggcttaaaaggccatgttacttatctaaggttatacaggtcatttatggggccaggacttttaactagatctccagttcatcatctccaggcctcagatgtgaatatctagaatgccttcctggcatcccattgctggtcttcccacttgcatggaaacctgtttctttagggggtcactgttcaagcataggatatgtaggacgtaagatcgttcccttctccttgtttgattggtaacaatgaacctttggcagattttattttttaacagctttattgagatgtaattcacatactatataattcacccatttaaaatgtatgattcaatgattttgactatattcacaggtatgtgcaaccatcatcacagtcggtttcatcaaatcctgtatcctctggctgtcgttcccctcttccaatccccttaacccacatcttcaacccctcacccccacccatccctaggcaaccactaatctactttctgaccctatggatttttctattctggcctttcatataaatgagattatgtagtatgtggtctttgtgacaagcttctttcacttcgcttcatgttttcaaggttcatctgtgtggcagcatgtatcattcccttttactttctttctttttttttttctttttttatctgagacatcatctctctctgtcacccaggctggaatgcagtagctcgatcttggctcactgcagcctctgtctcccgggttcaagtgatcctcctgcctcagcctcccaagtagctgggattacaggtgtacaccactatgcccagctcttttttttttgtactttagtagagatgaggttttgcatgttggccaggctcgtcttgaactcctagcctcaagtgatccacccaccttggcctcccaaagtgctggggttacaggcatgagacaccacacctggccgtatcattcccttttatggcctaaaaatgttccatatattgttgatctcttcatccattgatggacagtctctgccttttggctattatgaataatgctgctgtaaacatttgtgtacaagtttccatgcggacacgtgtttttatttctttcgggcataatacctaggagtggaatggtaactcaaggtttcatcatttgaagatctgccaggctgttttccaaagcagctgatcaattttgctttcccaccagttgtatatgagggctctgatttctccacattcttgtcaacccttgtttttctctgacttttttattctagccatcctagtggatgtgaagtgatacctcattgtgaagcatgagggttttgctctgccttttttctatctcttgttcatttcagtggttatttggggagagctacccaggatggatgcgccggttgtgtacttaacagctccatggggtgcttttcatgtcagccctgttaactacgttcttctgccaggttaacttggaagactcttccaatctgcagcatgataattaaagtgtatttctatctgatttctctctggctcattccagtttacatttttgctgccccctaaataggcagcaaactcctgatccagatactcctggatctctctctcacccttgcccaagaccattcataaaaaggcataactaagagatgggattgaggccagtctgcttgacagctgcttctctagttcttccccaagggtccaaactagtactcagaatgctattgcctttcaccaggagcctgcctccttaccaaggagagcaaggctgtgtgtggtcagggtagcgggtggttggtcctgaggctggtccatagtcctggcaccttttacaggcagaaaagaaggacttgtgaagggaagagctgtctgagttggttataggctctgttcctggattccgatcctggctctaccacctgcgagaaatgtgtctttgggctgctcacctattctctcggagctccagtggttttatccataaaatgaggatgcacagcctaatggaacacacccctatgagttgttgtaaatactaatgcttgttgcatgcctagtacttagcatgtgatgagcagatcacagccagctttagtatccacagttatcatcagatgggtttcaggaatggttgagggtgggaggtgaaatcaaagtgtataaaacctggatgtggaatttaggattgtttgtcaacatgcctcattaactaggtctccagagtctttttaagcagtaaaaagaaggaaattctgccatttgcaacaacatgggtaaacctggagtacattatgctaagtgaagtaagccagacacgggacaaatactacctgataccagttataggaggaatctgaaatagtcaaattcatagagacagagagtagaatggtggtttccagtggctgggaaagagggaaatagggaaatattagtccaagggtataaagtttcagttatgcaagatgagtaagtcccagagatctactgtacagcatagagcctatagtttactgtattgcatgcttaaaaatttgctaaaagggtagatcttatgttaagtattatcacaataataataataataagagcaggaggaatcttttggaggtaatggatatgtttatatcatagtttgtggcgacggtttgacaggtgtacacttatttccaaactcatcaagttagatatgttaaatacatacagctttttgtatgccagtcatacctcaaaaagcggtctaaaccgaaaagaaatttgaaaaaaggacgagttcatgtcctttgtagggacatggatgaagttggaaaccatcattctgagcaaactatcgcaaggacagaaaaccaaacactgcatgttctcactcataggtgggaattgaacaatgagaacacttggacacggggtggggaacatcacacaccagggcctgtcgtggggtgcggggaagggggagggatagcattaggagatatacctaatgtaaatgacgagttaacgggtgcagcacaccaacatggcacatgtatacatatgtaacaaacctgcatgttgtgcacatgtaccctagaacttaaagtataataataataataaaaggaagttttggattaataaaaggaagttctcatttccttatcagttaaattagggcagatgggttaaatcatggttcttgagcttttttgaatcacctaggaagttatactcacgtgccaatgttcacaaaatgttgcacacattttaagggatgccccctttcccagacaccaggttagaaacctagagcatggataatctcagatgccctcatctagcttaagtattcttcactccatgtctgtggccatagcagaggccagagttcaagttcaagttcaggttatctctatctctcaggtcttcagttggctgggctggggagtagctagagaaaagaagtgatgccatctgcctcctggggcttgggagaggagcatttgaggtatgccaaagtgcttcatcaactgtgaatggcttcaccagtcattcttgtaactactttgctctatgaagaaatgcaggattgaattatgaatgctttatggattcaatgaattcctggaaagttgcaaacaaatcaggtttttgaaaatccatctctgcagcatctggtcatgacaccatttagaggagcccaacagtgaatcttcgactggggcagacagacattctgttgcaaagcagagcattcttccctattaaaatgccaacctgcagatagcagatttgctcagaggcaaagctggaagttcagagaggggcccagaagagtcctggttgattctgggtttcaggaatggttgagggtggttaatggagtcattaggaaaatcttggggctaacatccattgctctacaaagtggttaaagcatggactgtactgtcagagacccaagtttaaactccagcttcccgtgtggaaaattcctttgtggcctcaggcaggttaccaacagccctcagcctcagttttccaatctgtaaaaggaggataatcatagtagctgtgagaattaatagtgtgtcaaagcacttgacatagtgaaggtactccataagtggtagctgttaatgaggctttatttttattgtctttattaattattaccatggtctaaaatagcatgtggatccacctggaccatgcttcgctcagggggccaaactccatgcttttatgttatttttatgagcatctctcagtcttcattttagacagaactttgaggtcatttaggacagatttccactgagtgaggaagtccttttttcagcctccctgctagcaaatcatcccctggttgaacactcccattaacaggaagctcaccacctcacagggttcttgtcctatcttaggactcttctgcatgttagaccatcactttttgtgctgagttcaggcctgtatccctctagatgcatgcgcgttctaaccatcctgtccccacgacatggtcgtccttcccacatctgatgatgatggctctgctttctcaggcctcttcttctccaggctaagggagcctctcaccatgcaggttccccaggttatcagcctggttccgggttatcaaaggccttgtaccacaatgctcagagcttctgggctggtccaaagtgctgagttcagagggaccaaggagttgaccttgagggataaggcaagggaagtcactgggagaccagtcttctggggggcttgtcctgagcatctggccctgctgtcattcctggacccatgtcagtcccagaataggaagcccacagcctgctctctactcaggatggcctgggctcatcagtggcatgtaacgtggtccacaggccctgcgagatcctgcctgccctgcaccctctgcctagggcaccatctctctcttctctaagatctcagcttagactccatgtccccagaaaaggtcctcagtagattcccagatccagggctgcagctcagagatcccataatcccacataattctccaccatgggactggccatgccatatcacagtggcctctcttctgcgtcccgctaggctgtgagctttctaagagcaaagacactctctgcctgggtcaacattttatccccagagcctgtcactgtggcctctccctccatgacatttgttggttgaatgaatgaatgagtgaataaatgcttgatatgagacaatcccaattggtgggaaagataagccaaaaacacctgtcagaaaagctctagacctgaacccagcagacagtggtctcaggcggttcctatgtccttcacagccctcacccagtcctctctgtccagatgaaactgccaagactgattacaactcagtgttgaaccacaggcctcccaccaccccaaattagtaattaatatttgaactcttaataatcccgattatgatcacagtgctaacagtgactgttcactgagtgtcttccacttccattatgacagcagtgctacaaggttggtttttatccaattttatagataaggaaactgaggcatggtcagcaaagatctgcccaaggccactcagcttgtgtgcagtgaagctgaaattctagccaattcctctggctccatggctcttactaccctccatgtgctcctactactggctgtaggaactagagatgcttctcttttcccccaggagacaggggagcaatcagaaatgataatgtagggggagtagtgttatgataaaatccagggttctctgagattccaggggagggtccctgcagactggagcatcacttggggaaactgccatggaaggggaagcttgagttgcatgttttctctttttagttttctgagatttttaaaacacaaaggcagtacagtcttatagacaaattaagcaaaagcatccctgcttccctctttcctcccctccagagtaatgagagttgagattttgatgtgtatctcctagactatctatgctcatgtaaacatgcatagtggtgtgctggtagatgtttacaactgatggtgatggtgatggtgatggtgaggcaatgtgccaatttccatggtgtaaatgctccccccatggctgatttcaagctactagcatgaaatcactgaatgtgcaattgggaagaaatatgcaatcgcaactattgtatggtatttctactctgcagctacagtagaggccagtaccctagagagcatagaaaatcatcagtcaaatgtagtaaaataattgggaatggttaagttttgagtatttattgccttttaaaaatatatcatttattgaattgtaagtttatatcatttagtttttcaataatggctgtgtttgacaactggttcacaaaattcctgaaaatttaacagttggctctcagtcaacataagctggctccagcatagcactcatttcatttttactaaaatcttaacattttataattttttcttctttcttccttcctgccttccttcctttcttgtttctttccttccttctttccttctttctttcttcttttcttttcttttagaaacaggatcttgctttgtcacccgggcttgagtacagtggcacaatcatgggttactgcagcctcaaactcttgggcttaagcaatcctcctgcctcagcctcctgagtatctgggaccacaggcgtgcactaccacacttggctaattttttaaaaaattctttgtagagaggctgggcgcagtggctcatgcctgtaatcccagcactttgggaggccgaggtgggcggatcacgaggtcaggagatcaagaccatcctggctaacacggtgaaacgctgtctctactaaaaaaaaacacaaaaaaaattagtcaggcatggtggcaggcacccatagtcccagctacttgggaggctgagtcaggagaatggcgtgaacctgggaggcggagcttgcagtgagccgaggtgcaccactgcactccagcctgggtgatggagcgagactctgtctcaaaaaaaaaaaattctttgtagagacagggtctcgctatgttgcccaggcttgtctcaaactcctggcctcaagcaattctctggcctcagcctcccaaagtgatgggagtacaggtgtgagcatcacacttaaccaatttttttctctttaacttgctttttacttaaaaggctctttttcccatcattctttcattcaaccagtattccaccatgtgccatgccctccctgcgttaggaaccagggccaccattgtgatcagggcagccacgtgctttgcactcattagcttacggtctagccagggaggcagtcagttaccaaatcgacaaatagatatcaacaaaatgctcactgcaattagggctcttaagggaagttacaggatgatgtaacagagataatgccatgatagaccagggatgaggtatggccaggaagaacttcctttagggtcaaggctaggagaggcttcttctgtcaaactcacataatctgagacccaaaagctaagaagggaccacatattcaaagcttagtgggaaaaaattgaaaaaggatatgttcacttgggtgccatttctgtaaactttacacacatgcaaacagtcctgtatgttgctctttgaaaagtccttgtgtcataaaaatgggaaggcttcccaccatctctaggatggtggttactcttggagggaggaaaggaaagagaagaagttggaggcagagagggtcttccactgcatctcagcattttcttgaagcaaaaggagagagaggcctgagacaaatataactcgtgttaatttttcttggctttagctgatgggcacagggttgtcagctgcattcttctttataatttctgaatgcttgaaatatttcatgattattgttatttttaagggtagataaaagaggctctaggctcaccctcagggcatcaaggctgcagaaaagtgaaaaggaagtgagaggcccagggtaagttcgggggcaggcctgtagggtatgaaggctgtggccataaatatgagttttattgtaagtgcagtggatgccattttgagctggtgcgggacatgatctgatttacattgataaagggcttctctgctgctttgaagagaacgatggaggcttatgaatggcactaggttaggtaggagtctaggcatggtgactatccatctgtttcccatctcccaggagttctcccaggctctgcttcaccaagtcttcaggggaccaaccctgatctagctcatgtgtcaaaacttatcaagttgtaccttatatgtcaatgatgcctcaataaagctgttagaaaggaaaaagaaggaacatgtcactatgaaacagaaagaggcaggatgtataaaagggtggacctgaaaaaaaaactaattaaaaattctgggaatgaaaaatattcatcaaaataaaggtactcattaaaaaaaaaaacaaagaaagttggaaaaacctcagtagatgggagaaaccccggattagacacagccaaagagataattagtggactggaagagagctctgagatatttttccagagagtgcccagaataataaagagaaaaatatggaagagtagttaaaagacatgaaggatatattgagctactcccataatttttttttttttttttgagatggagtcttgctgtgtcacccaggctggagtgcagtggtgccatcttgactcactgcaagctccgcctcccgggttcacaccattctcctgcctcagcctcccaagtagctgggactacaggtgcccgccaccacacccagctaattttttttgccatacgtgtttaacagaaattgtactgaaagagaatggagaaaatggccgagaagctgtattcaaaagcctaatgactgagaattttccagaattgaaaaggatatgagtcttggagttgaaaggtgttcatcaagtagtaaggagaatttcaggaaagtaaatcttcacttcaaaaccacatagcaaaactgcagaaaatcaagagtaaaaggaaagtcttaaaatttaccacagacagattatccacaaaagaacaacattagactgacagctgttgcttttgcgccgatggcagtctttttagcagtcttcagagtgctgaaagaaaataaaacttagcctagaatttcatacccagctgaactctgattaaagagtgatgatgaaatgaaagagaaaccagccagcttcaaaccctgaggctcttgaacatttagaggttggggagaggaggaaccctctcaaatcacatatattcagtcatccagcagtggcctctgtctcccacagaaactgtaaggagagaaggattggtttagcctttgtagttgcagtgcgaggccagtggaaaagccccttgtcagccatgttgctgagtattccatcaagacagaggagggagatggtcccatctgcttcccatcttccaggaattcaaaacacctctgaagggctttgtgtgtctaggagaataggatctccagtgtctctagaagaatgggaatgggtggagggcaggtagcagagattctgaacccagcctgcatttcagttctgtagcagtggtgacatttcagggggagggggagggagcaggtgggaccaggccctgggccctggttgggaaggagcccagggacatgagaacccctctagaatggcccatcctagactctttctctttcttccagattgtggacaagaacaaccgctataagtccatagatggctcagacgagaccaaagccaactggatgaggtgagccctgctctgctgatgtcccgggggtcttgcctggcctctggaaaggagccaagggagtgtgttggacctgtgggagctccagtggtggagacttctggaggctgccgtttgcagggtttggatgcatctagctctgaaggacccaccttttcccctaggcctccatcagggggctctagaggacggcgtgtggtcaggccgttgggatgcagggaccgctcgggctgctcacttgccagtgtgtctggaggtcctgggccccaggctcctggcagcattcctagggaggaggaggagactgtcccccacctaggactgtgacacctcagagcaggctcctgcaggggtggtgtgagaatcgtcccagtgcagccccagcagttgtttaaacagcctccatggaagaaagggctctgacaaagtcttcagctcagtttttgacagtgttgctgcctatgtttgagtactttgaagtgtcaactttaccctgttccggtgtttgggacagaattttgcaccagaagttttcttaaatgccaaccagaggaggcaggagactggccccaggcagggtcacccagggatggctgagctgagcccagaaccatgggtccagcgtgatgctgatggtctgtgccatgtgcgagggactctgcctggtggggtttgtggacaggggtgggagatctgacatgccttgttgcctgcttggtggcctctctctgggacctaggagcactggctggagatttggatctgggtgggaggggaaggaagcctcagatgtctggagtcaggggcacagccacaccatgggcctggggccctctgccggcatttgcacagttttctgacccatggggccttgaggctggtggtgggattgtacttggagagagggcaacttcctaaaaaggagtgtgctgtcttaaactcggagactttctaagcaaatgaggagaagcaggtttgaggcgtagagtatgtgatgagggctcctgtgtccttcccagtggctccactgcccacctatactcctatcagagagtggctgagcagcagttcacacctcccagattactttagcgttcgccctcttatgggttagggaaggtgttctcattgccgtttgatgggtgcagaacagaggctccagagaccagcgggccccctgccttgcagtgtggagaatagcaccgactgcccccaacctccttggacacagctgatccgacactgccctgaaagtggccccagggaggtggcttgacaccctgactgccttctcttctcactgccacggggtccaggtcagctgagcacttacagttcatcacctgtgtactgagcacctagtttgagtcagactgtgaaatgggtaccagggtggatcacccagccctgccccaccacaccccatgccccacccccgctggcccttcccgggctcacacctcctaccacagaggtgactttccagtgtagtttttgcaccgaggcacaatgtgctgcagaggcccagatgaaagaggaggggttcgttgacatgggccttcaaaggggccaggattgtgtctggggacactgggttgtggtgtctagtcaggctgttgggcggctgctcagtttggaccccaagcctgtgctgctgtgctgcctgccctgtggctgcagcctggctccaggcaagcaggggagaccgtgcgtgtgtccacttgggaatcaggctttctgtgctattgcttttaaggcgccgggagctttgcccatagaaccgaatctgttccactctttcacccatctctgatctttccccctggggacaaggccttctcaaaaccccaaaaaaggggagctatcatccaaactaacttatctatcctctggcaccccgcagattgtgacttaattgggctggggattggccttgggccttggtatttttaaagctagtgattctgatgtgccactagcattgagaaccactgctctgtacagatcttcatgccacagtggtcaagctgagagcagggcaaggtcttgcttaagagcatacagtcagggtagcagaatcaggatttgaactcctggctctgtaatcctaggtcggtgttcttcctgcttgtgcacaagggaccaggtgaagcgtggcttcctgggcctggatgggcactggtgagcaggggtttgggggtttctgctactgccaccttgctagcatggtttctgtcctgttctgctcccagcctgtcctgattcaagatggcatctgggtagtcacagctggtgggctctcatcttatgaccactcaaagagcaggtttgggttagggatgcagtttgttgccacggagacgcccctcctgttgctgttggagtgacgggaaagctgttaatcctgggaatcctcctttcccttcatgtccagcttccgtggtgtggctctttctgacttgcagatgctctcctttgcactgtcatggcaccgcttggggatgattgaatggactctgttagtttcttaacaaaattaatggtgggccaggaggcgaatgggcactgtcgtgttgagcttatctttatgacagccccatctaggtgatctgtctgtggtggttctcaaccgagcactattttgtgcccctgggggcatttggcaaggcctggagacatgtttgatggttggatgctatcagatagaagccaaggatgttgataaaatcctgcattacacaggacaccccttccccccaacaaaaaattttctagccccaactgccaatagtggcaagattgagacacccacattaagtcctcctgatagccctggacagtgacactagaattgtcaccctagttttatggagaaggagactgggttcacacgagtcccatggcttggcccaaggagactcagtctctagttccaggtctagtcccatattcctgccaccatcttggactgggtaatgaggcccccagccttcttcccatcttctgggccctggtgttttgggtgcttgagtaggaaggtgagggctgaaggatgttggtgccgccggccttcccctcttggtttcagaaggaaaccaaggagtgaatgcgctctgagctttcctccataccctcatgtcctctcttgggtggattttttaaccttttatcactagttaaaagggtgacagagccacgatgtggagaaatcaagttccaaagccagagcaggagccaagtgggatggaagggccatgctgtgccccttgcccagggcctctggctgctcagttgagagggaatcccaggtccccctggtgtccaccaaagtggaacttgactccctcaggacagtcgtgggcttctcaaattctaccaaaaagtcacagcagcccacccccgaagaaagcactcccatgggaaggaaacctgtttgcctgcacatatgcaaaggtgggggcttggagaactgaccgggacggggaaggggaagagagccactaggcagaataagctttctgtggccacaccctaatcatggcattgtcactgctacacccaacggtagccagtgtaaatagtttccctggttacgtattcttccgagccattcattcagctgtagggctgtaggtaaatatcgctttatagaggcaatgggctaatcctaatttcaataagatcctttactgctatctttaagagattttaagccccttacatcatgatgtttttccctccttagtaataaacccgaagagttgtggttgttattctggacagggagaataaggtgtgaaaggttgaacatgaactgccctagctctcaccgctagtaagagctaaagcaggccctgaaaccaaggccttcgactctgagttcagtgctccctcccatgtaacgccgtctcttctttccaccctcccctccgaggagtagtggaagggacctctcagtaggaggagggtgtggtgggggccaggttgccccaggtgcctcctggctccccagctgggggccagcaattaggaaggagaaccacctgcattgacggtcatttacccaattgtgctttgtgggatattcaacccaaggaatgtggcacacctggctgagcgtaagaggaagcccaagttctccaaggaggagctggacattcttgtcacagaggtgacccaccatgaagcagtgctctttgggagggagaccatgcggctgtcccatgctgacagggacaagatttgggaaggcatagcccggaaaatcacctccgtcagccaggtgccccgctccgtcaaggacattaagcacagatgggatgacatgaaacggaggaccaaggacaagctggccttcatgcagcagtccctgtcgggccctggggccgggggccgggcccccaccatcgtgctcacggcccacgagagggccatcaagtcggcgctgctcacggcccgtgcagggcgcggcttccccagggcggaactggatggcaccgacagcccttcgaccagctgtgagtatcaccagtcccccccgccacccagccggctgcctgccccccagcttacagtccacagtctcccaccgactttccctctggttctctcctgtccctctctgtccagcccactctttccatcctcccctccttctcccactcttctcctctccatccctttttgcattcattctcgaatatttactgagcatctccgtgccagagccgtgctaggagctgggaagacagctgtgtgtaaaccccacgcaggccctgctcttggggagaccctggactcctaggaataaaccaacgttaaataattgcacgagtaaactggaaacgaagggatggaggacacaggagtccaggaggtcccgagagcagggctgacttcatgagcatgcaacctgaacagtcacaggggccgcggggtttcaggctctgctgtcgccatctggacattcttcatagtttttgagccaggggccccacgttttcattttgcatttgaccctgcaggttatgtagcagctctgtctgagagttaaggagtgggtaaaactggctccactggggactggggagggctccctgaagaagtccagcggactaggatgtgaagagtaagagttaaccaggccaggcagcagcgtggggcgcggagaaggggaggggaggcgcgcaggcagagaacagcatgtacgaggccccgcatcaggaaggcgcttggcacgttccaggaacagtgagaagccaggaaagcccaagtgtagcagcgcgggggagggggctggagacgaggcggccaagctgtgaaggcccgggccgggccatggaaagatcagttcctttctgtgtctggtcctgactgctttgttcctctattattactcccctgcctgagccacgctgcctgcccccacttttctgtgtgctgcctctcagctccctctccatcctcctggctgctccgccacccgctccccacccctcttctccctctgtacttgtccctgcctttcctctctacttcctgtgtctcacatgcactttgaagccagggccccagcggccgaggcgggtgtcccttggggctggagttctagttggggctcagcagaagggggagcactaaaggcctccgcagggactgcaacccttcctttccacttctgcacatctcccccgtgccccgccagctgcagtccccactagaggccgtctgcctgaccggctcgtgagtggtgggagccaggcaggaggggccccggggaagcagccgtggctcagcccatgggaaggtgctttgcaaagactcacttgcaccttcccttcccgggccccctgccattgtgatccacttgcttcctgtttggctggggctcctgacaggtggcagttcacagagtcagatgtttaggactggaaaagaacatggagaccatttagttcaacttccttgcaatgcagaaagtaagctctgaaaaccaaggtggccctgagctcaattcagaagcaggacttgaacccgggtctgctggcttcctgtgaatcagtgttttcctaagtcttaagaggattccaccccgtgataagaaaaaatgggggggtcagcatccagtaaagcctgttccctgcatcctgctccgctcacccctccatctccctgagactgaatgtaatgaggccaccaaaggtaacctgggctggcagggagcccgagtgtgccatcaggcagagcccgctcacccccatggcaggctcacagccctccttttcctggcagtggccagctgcggcagcactcggccaggggcttggcagaacggggacctgggagggaaggagcagcatcacctcgccgggtctcactccttccaacactggccatgctagacaggtctctgggatctcaggggatggctgctgtcccaccaaacactgccaagagacacaggactcttaccaagctggcccaagtgagcccccaggacccctgggaggcatgaggtaactgtaagataaacctgtctgtcctccccatcaccttcctggggggtggttctgagttgagtccgcagatccaggcagggagggcttgcctgtcagtagggtcagcccatacatcatttaatcctgccacagggatcagcccatacccttggtcaccagaaagcaggacccacatgtgcagaggctgggccccctccctgtgtccggctgcaaggagcagtctgtccgatggcccctgtgcggtcagatgctcctggatgggagcacgatgtgactgaactggaagcctgccttgggggacagggggacagcagggctggttgcagaggtggctctcctgctctgcactgtcctgccagtttcttcagcctgtcagcatgtgctgcagtgatttaaagatgcagattccatattagtagtcttttatccctcacccccttcccactcttccccccaagtccgcaaagtccgttgtatcaatcttatgcctttgtgtcatatggcacagtgtatactgcttgggtcatgggtgcaccaaaatctcacaagtcaccactgaagaacttcctcatgtaaccaaacaccacctgtaccccaataacttatggaaaaaaaagtgtgcagattccagcaaggccacaagatggccccaagcaatgcagacgtggcctcagaaagtctggtgctcagagggccaagagcgtcttagtacctttaggcaggtgccgctccttcagcgttacagagcaccttcatgtttgtcatcttgtttatgactcttcttaacaacccaattaggtagccaagcggttcgatgtgtagacagggcagtcgttatctttgcagaaagtgaggtgcagagagatgaactgactgctgaggtcaggagctgctgggttggcacgcagccggtgggccacggtctccaagtcccctggcctgggctcttccccactagaatagagctgttccgttgagaggaagaggaacttccccccagggatgctgggcccacgcacctcagggatttggggaacgtggatttctctatgggcgggggccaaactagaccgcagggtggcagggcagggggatactcaggtgtttttcaggggcagggccaacccctgggcctccctccttctcccttttgtaaccacttttccatctttgtttctgtcccccaagatgatgaagatgaggaggcgcctgggccctcaaggcagcctcttcgggtgcctctgcagcggtctccggaggaagaggcccacctggccaggcccgccctgctccgttcatcctcctcctcagaccagtctgagacggtgggccccaagccagaggccctgccccatccctcgccccaggcccaggctgcctgcaggacccctcggccgcaccccagcccacccaccacgggccttgactggcagctcctccacgtccatgcccagcagaccgaggtgttccggcagttctgccaggagctggtgaccgtgcaccgggacatggccaacagcatgcacgtcatcggccaggccatggccgagctgaccagccgtgtcggtcagatgtgccagacgctgacagagatccgggatggggttcaggcatctcagcgggggccagaaggggcagaccctacgggctccactccccaggccacccaggcccaagcccccctgccagagcccccaccagcttccccagcatcagcccccacacggactaccaggtctcggaagagaaagcacaatttctaacccagctagtctgcactaggaggaagagtcatggaggagggatgtctggcctcacaacaggggccagtctttcgtgtccaggaacaggatcgatgacccttgtaggacactgggggcgctgttacctcctcaccgagcgcaggtcgctgccctgtggtctaacagagcatgtattcagacccgcaccctcatctttggcggatgctgaagatgcaagaaaagccacctgcttgatgcttgcttggcctggagatcgttctcctcttggtctgtgtcccgtggcggcaggccttgcagggaggggggcgcaacagtggggagcatccgaatggagtcccactttccaaccttggggctgctgcatcggcctcccacatgtgacctcccaggccctgatgctgcttcttttgaagggggtgaggcctgatgggcaggtcaagtcggtccttcagggaggggtctaccctcccttgcccgggggtggtgcccgccttggccctccgcttgcccttgtgcgcgtgctcagctgctgtgcttgccttttttggagtggggagaagaatgggatgacgtcggaggaaggaaaagactgtcttgcattcatagagagcactttatgcttttcctcgcccttgcagagtctgggtggtctcagtgggggctcaggacagtcagctcaagacagccaagtcaggtattattatgatcatttttatcatcatcatctgtataagacaaatgacacagccagttagtgagagggccaggactggaagccagggtatcggttttcccagctcccctgtcagaggccagatctggagtagtgggaagaggaggcagggggcaggtcttgccccttgccaggcctctgccccttgccaggcctctgccccctgtatctctgcttctgcctcagctgtcctgggtgaggtgggaggcacctagcatttagcaggtgattctcccaccctgccctggctctatggctcatagccagtggcttggagaggcagggccagatctcaggagtggagggcaacctcttccctggcttctaaaagaatccagagcccagtggggctcatgtcccattccaggttccagcatgccttgcctctgcttgctcgggctgcctacgcactagctacatacacctctagcttcatgtttcatgttggagtgtggggagaaaactgggttcttagcattagagagggaagtggcaggtggcagatacaagcttagctctgacctgggtgcacctcagctctgtgtccttttttttccctgacctgaagctgaccccagcagaagtcccccagccaacccctccacccaacaaccccccaccctcccatcctgcccccagccatagtgggagctgggaggattgcagcatctagtgccttccaaggctgttcctggagcgctgcttgtaaacccaagccaagctttgtcccacgtagggagaatggaaggtgactgcaatgtccctgtgcctttggctccatctccccattctgtggttctttgggggttcctgcttccctcaaactgaacactctcctgtccaacagcctgatggcttaattattgcctggaattgcccggcctccgatgctggaatcaaagattgccttccgaagtatttttgttaagatggcaataaaaagaaatcaatctcactctttgaacacacccagtgtccaggatctttctttggtgtgtattctctttcttcgtttcctgtgaaaacctcgaggaccccaaagcaggggttagatgtttaaggaaaagcaggttggtgagaagggctcaagtgccccttgatttccctgattctataaactgccagattccctgtatccagcaccatgccaggccctcggaggaaaggaagggcatgcatgcacgaaaccactcagttatatttcatttctctgctcaaaagtgaggtgttgctaagtcaattttaccttttgttccctaaaagtaagcgagaagttctggaaaaacaatcaccgtttcggacaggaggctctagaagggtcaggggctgtccatgtgccagtgcactttaggggccacctggaggcatgaccctccccaccaatccaggtgtctgtgtgtctggcactggcaaggctctgcccacctagatctgaggcttctcaaagtaaccaaagctgcctcctctgccaagaggaagcctcctcacctgtgcattgccctggcttaataccagtctcagagagcttctctcaggcaggaaatcccctagtcttgcccacagatcccctttctagaaggttctaacttgccatcctccacagttcttggccaaaaagcatggccatagaaatggaggactacccaatttccgagagatgcaaagatgtcgtgaaaccattcccagggccttctctcccaaggtcaatgtatgaagcagtgactggctggctgctctctctcttcctggggagggaaggagccaaattggaagctgtaaaactgaaatggaagtcagagcaaaagggacagtgaggacttgtcaacttgggatggaaaagattttcagtttctgtttcttggcttcagtggggattgttgggctagcacattaaaacaggaagaggaaacttgggtgagagacagaaatgaattggaagagggaggcctctagccatgaccaggtgaccatctggtgggtggatgtgtgacccaaagcccctcctagcccggagacctatgcatgtgagaacacagagcccagcctcttctcagtcggtcttttcctagttctgcctccttaactggggcagcttcctttgtattgaagatacccactatgcaatagtgtctgagcctggcctagtcaattccctccagcaaaatggatgccctgtgttatgttttctttgcgttagaaacaatagtcatgtgctgacccagctagaaaatatgatgcacttgataagacacagtgggtgaggtctgagaattgttgtcttagtacttacctatccagtccccaaggtcagctgggaggttggaataaaaacaatccaggatcatcatgacaggtttagtccagagctctccaccgccatcagcagcaccaccaccttccccttgattgctccaaaggtcccaaattctgtgggttggagttgaaatgcctcaataagcactagcatttgcagaacagtctcagccaggcattctctgtgccttctctcaagaggtagtgacctggtaactcttcaaacctccttgcaaagagctgctcagccacagtggatagattttgcccctcctggtagccttccactccttggggagggcttctgatttctgcagccatgtaatgaatggaacaggcacagttcttcataaaggggttgttgtgaatggggacagaagggttctggggggtggtcgagccagcaggtgttaaggcaaaacacttaaaagcaggagatctaatcagaggtaacaggtctggggacctagctggcttcatttagctttacctcttaaatggtataacataaacatcttgtcaggggaatgggttgtgattcaccaagagttgccatatacattgtatttcaaatgctaagtttcagaacaacaaatacaacaaaatctgaataagcattgatctgcctttgaaaatactttgtgatttatacaacgccttgaggttagctttccaaatattgattcttgatggatagaaaaagaccagaagatggaaagttaaattgacttgagtctttctaaaccttttgacacaccctagaagttgctcttttgaataaataaatcccagataggaatgtatttctcatctagctttttctcttgatgtcaagtgtcagagaaataattctagcttttagaggttggtggttgtttagaaactggaagaaaaaaaggagaagacagtattctccaatcatagtgctatgattcaagtgagtcttgtgagaaaaaagacgaatgaatggtttcccttttgtatctgggagcaggaaagtttggaacaacttctattctgtgctaaccgcaaggttgattatttttggatgtcaaatcctagactctcactaaattggggactggaaatattttgcatattcagaagaaatctcagctatggagaaaagactgactcacagttgtagaattgagattgggaattattaatttggagtgacttctctcactccaaattaaaggaaaaggggctcttttcctttctcttaagtcctttgttaataacatcctggctgggtgcgtggaaatcaccctgtggtcttcactactcagggatagcgatgcttatatccgatgtgataagaacaccgatgtgttggggctaacagagaacacagacctaggacaagatgcaaattctggcggatctaagcaccgtaaatcttgcaagttctacacctccatggtggagcctgtggcttgcttctctcaaaaggttgaagcagccaaagccagcatttgctctcccatctgccttggtcttactccttctgaggtcttgcagcatcctgttgccagaatggattgttccctggactccagtgatcctccttggaaggcaacagcctcctcccaggctctccagatgagcaaggcaggatatagatgaggggcagctggtgccatccctgggacctctagaatgtagattctccatgctgctagctgccaccactgtcacctcatactggaattggcattcgtatatttcttttctttatatgtgtgtcaggagtgaggtgcgtgacagtaatagttgcttattgagggaaactttgaaagtatgcaaaattacaaagatgatccacctgtaaggggttgtcactgttaaaacattggtatatttccttcaagtcgtttactggggcttgtttttaaagcattattggaaccatagtctacttccagtcctattgttctcacactatcttatttcaacaccatttttccatgtcataaaagattctttgaaaacatttttctatagatgaatagcattccattatataaatgtaacatcatttacgaaatcttatctagtattagacatttaaatgttttgcctttgtactgctatacacaatgatacaagtcagcatattggtatgccgggtttgcatacttcatccataacttatgtttcttgagccatattgccaaattgtttcctaaagggttgcacctgttaattctgcatcatcagtacaggagacacctttcttaccacctttaccaatagagatattatcatcttttagaaatctgtgccaatgagacaatgtactacgctgtgtttcttttattagtgatgctgaatacttttcatttgtttattatccatctgaattcttctgtgaatttttgtttcccctggacttttccagatataattcattgggctacaccaatcagacagactttgatttttgtcccttgtttttgagacaaaccataacataaagaagtttattttttactacaaatttcctaggtgcttgtgtagctcagaaccctaaaacgtcaactaatttcctcttgccctctgatctgtacaccttcactcctcggcaggtgttccctcatcccaccttttggaggtgggtagggtggtgggctggatgtcgcacatgttgtttcagtgagaatgggcgagggccatagattctgagggtttgacagaactttaaaggttttctgggcattgccgagttggtgctttacatgcccacataggagccatgagttacagtgggaaacgtgcataggactcaaagctccatctcccatttattagctgtgtgactttgggcaagttgcttggcctctctgagcctcagtctccttaccttaaaatcatttagtaagattaaccagtggttgtcaaccttttgtagtctgttatttaccttcctcccctgtccccactggagcccccattttttaaaagattttgatctttagcatttattaattgatctcttggacaccttgtcacaggggctatttcagcaaggctttgtgaaatactggaaacagttgaaggaccccagccttaccaccttcagaggcctgtgggtatctgggaaccccagtggttaaaagttagtgaagagtagaagagataacctttcagtttttcaatcacttataatatttagttgatatattttccatatggtgtgaggcaggcagggcaggtgtcatatccagtctcagaaaacagagattcttagaggtttggagatctgcttgaggtcccacaacacggtgacgttgggacagggatgggttctggctggtgctgcttctccggacagggcagctgctctgctgatgttcacatgggcccacgtgcctgtggacttctaaccatccacacttgcccagcactgtgccggcaccagcgggcactcaacaaagggtggcccgtgcgttctcacctgtctcccctccccaccaggtacgtggtcatctcccgggaggagagggagcagaacctgctggcgttccagcacagtgagcgcatctacttccgggcgtgcagggacatccggcctggggagtggctgcgggtctggtacagcgaggactacatgaagcgcctgcacagcatgtcccaggaaaccattcaccgcaacctggccagaggtgagtgccatgctccacatgagctgcgcccacctctgagccccaggggaggcctggatagcttgttttggagcttcctgagaaatacggttcccagcaatgggaagacccagagtgattcgggggaacagatggttgaggtctgagcagcagctctgggccaagcaggggccaccccagcatgttatcgacccctagaaatggtctcagaaatccttaccacacacatttcagagtattcatgagagagacgcccccaaaaccgagcaaatatgtttaatcaaaatgtaccctatttccccaactccagttgatgaaaagatgttacaaactgccactgcctcaataatgatcgtaataataggtaacatttactaaatactcaatatgtgaaatactgacaacagtccaaggaccccagtctaccaccgtcagaggcctgttgggtatctgggaacccctgtggttaaaagtttgtgaagagtagaagaaatgacctttcattttttcagttacctgcaatatctggtgttgatatattttccatagcctgtgagcagattttctgcatgttcccatgtaattatcatagcagccatccctaccctgtcagtgcaccctgagaagtagatggagtcatggacatgtggcatttaggacaatgcccacctccatcatcagaagtcctcagctataaacttttaatactcatgatcccacatgcattcttttacccatcttacagatgtgcaaaccgaatatcaaatgaatacagtgattcatccagggccacctggctaggaaggacagaactaggtttctaatccatattggtctgacttcaaggtctaagttctgacctgcaatgttacctgatgtcccagacaaaaccagtcccctcctgggttcctcctggtgtctgtactgcagtcctaatgagatgaggtgaaaaaacaatctctatcaaaagaagaaggttggcaggaggtgggatggtgacttaggtgtgggaagccgggtgggttcggtgtccatccagaagcagttttaactactctcagcccctagtcctttacccttttattccatcctcatcctgaccagtgtagactggtgagtccaggcccttctttcaagggtgttttttttgtttgtttgtttgtttttttccccactaaaaccacgcatccaaacacctagagtctatctggtgccaggaaccaaggctgttcccaagcctcaccatatcgtgttcctgaccaacttactaattggaaataaatcttcacttggaatatgaggggagaagatgaaaagggggtgggagtgacttattcaaattaagctatctttaaaagcaaaacagagcaaagcaaattgtggacattgagtgcacagctgctgcctgacttggtaaaaggtatctggagatgatgggcagtaaaaggagaccccataaacatactcatttcttgtcttctttggatctcagggtttggcacatgttggtttcacttggcaaggtgtgcttccatgatgaggctgcagtggtttccatgtgacctctggagatgcctcatgtaaaagtgcctgatacatagtagggactcaataagtctttgttgaatggataaaagaagaaatgaatgaagacagccaagaagctttccaaagaatcataccactagaagaaaagaaaacccagagaaatcatatctgagaacacagatttcatcccttggtcataaccttcttgcattcttctggatttgtgatgtccttttcttcccctcagtggtcttctccagagcacctgaagctgcatcatcctccatgagccccaagaccacaggggattgctcagagaagggtgtgagctttctggagtggttcaaaggaggcgtgtcagacagacttgaaaggagatacaccgagacatatgaagatacaggagggaagagggtctattcctggtcaggctgagcagtaagaaataggaaggaaattgaaagtcacagtggggcagtttcacagctgtgggtgatcctgaagcccttgggaatggtcatggagctcagtggcttttaaatgtgtgcctctatagcctgtagcttcagcggactctggttagtggtgtcccagatgggtgtgccattgctgctctgaaagggagatcccctatgcccaatcactcttggtcttatatagaaggaggtttctttgtaattggaggttggcaccctgatggagtccagagcatgaattattagttcttattaagtagggatattggttgttgccagaagtcttcctgaagagagtgtaaactattcctttgtggttaccttttaagaatagattgcatctaaagctcgcattcaaacaatttatgttatttgacctactttgattcactaatttactttgaggttttctttgtttttgttttccatgttgtatggaggctttggaaccaatttcatgatgcttaaaggtctcttttggcctgtagatttttctgaaagccttaagtccacaaagatcatactaagaaatttgaacaacgttgttttcaaacaatgacgaggaatctctggtgatttctaggcttgatttcccgatgtcctcagttgtttgctgcctgattgtcccatgaggaaaggaaaatgtggctcttgatttttagagattttcaatgggcaagtgctgcatctgatctgtaagacatacaggtggcattttcaagttatctccatctctcccctttctgtagctcagctgatatagaagtgcaggctgtggggagctgcctgggttccagaagccttggagataaagttgttccttaggtattcatgtgaggacagaaaaggtgcatcctgaatagataactcccttttgtgctgtaacctaaaggaaacctgaagtcaaacatggggcagggcacagcacccataccagctatgggaaaccagacgtggaacatctggactgcttattggcaaacccttggccttcaatcagaagtcttttgcaaatggagccatcagaagcctaagtacgttttagttcaagtcattgttcagcggcacatcacctagggcccctgcacctggtctaggaaacctttgagatttctgagttccataggctactttcaggaccctctaagggctgaagagattcctctgcctttttagcatctctcaccagcaagcatcagcacttctgtggcagtttatgaaactatgttggtaatttttaaagaatcaggctagctgggtgccatggctcatgcctgtaatctcagcactttgggaggccaaggtgggcagatggcttgagcctaggagtttgagaccagcctgggcaacatggcgaaaccctatctccacaaaaagtacaaaaattagggtgtgatggcttgtgtctgtagtcccagctacttgggaggctgaagtggggggatcacttgagcctggaaggtggaggctgcgtgagcaccactgcacttcagcctggacaacagagtgggtctctgtctcaaaaaataaaaattaaaaacaaggaatcagtctaaaataatttatggttgaggagctcaccaaagtctttgaaacaattgaaagtaattcaaagtgaattgaggtaattcacatgatagaaagaaataggcaaggaaacgtcctttgaattgccaagtgaggagacatggctatatttcctgactgctttgggtcattatggctaccttgtcctttatcttgtcggaggctgccatgttggagccctcagcgccataggtctccttgtcttcccctttcttctgcccttagtcgtcagtgagaacaacagaagttcagatcatgctttctcacatgttcctagtctgctgattgctgggagaattagaaaggacagttgccataggatggactttgccttaagtaggctgtctccagagcaacgaaggaggaggaaggagtgaggcctatggtgtttcatgtgtaccttttaccaagtcgaagcagccatcttgtcattgctagggctgaggggaagctgcaaaggttgggggagttgatactcacttggctctgaggtatgttcccaccacccagtgtgattaagtgggatgttgttttctagggtcataggaaagaatgttcaattactctcccttatagatttctcttaacttataaccgtagagcttgtagacatgaggcttcttggaaactgtctctttctaaaaggtctttccaccgttcaggtcctatgagtctagctctgatggaccactgagtgattcgtatctcccctttgcaacacttgccccaaaagcccagatctagagggatgtgtcaggtgacctaacaggaggcctgctttgttttctgttggtttctccaatttgggggttttccccatttccttacaccctggttttccttcctaggagagaagaggttgcagagggagaagtctgagcaggttctggataacccagaagacctgaggggtcccattcatctctctgtgctgagacagggcaaaagtccctacaagcgtggctttgatgagggggatgtacacccccaagctaagaagaagaaaattgacctgattttcaaggatgttctggaggcctcactggaatctgcgaaggtggaagcccaccagttggccctgagcacctcactggtcatcaggaaagtccccaaataccaggatgacgcctacagtcagtgtgcaacaacaatgacccatggtgtgcagaatataggccagacccagggggagggggactggaaggtcccccagggggtctccaaggagccaggccaattggaggatgaagaagaggagccttcatcattcaaggccgacagtcctgccgaggcctcccttgcatctgaccctcatgaacttcccaccacctctttttgccctaactgtattcgcctaaagaagaaggttcgggagctccaggcagaattagacatgcttaagtctgggaaacttcctgagccccccgtattgccaccacaggtactggagctcccagagttctcggaccctgcaggtaagttggtttggatgagattattgtcggagggcagagtacgcagtgggctgtgtggagggtagcctaaagctctctgtggaaaccaccttccgggagacctgaggagtgtaacgtggaggcggctacctccgtgggtgggagcccaggtcctcagtgtctctggcagacccatcggcagctctgccaggtgctccatgtgttgcccttgtatcctccttgtcaataaaggaagttccgctgcagaaggggtgtgtgctgtgttcttgacccgttgcctttctctggtactggtgtcttaccccaaagcccaatttctaaacccagtctttctctgtccccagtctcaagcagggtgtcccactggagagatctcttggcttccctaacttagtccaggaacacagccttgttcttctcttcctgaatctctgtcctgccacacatggtcccagttccctagcctggagttctggaaggatggagagtgaggggatccaggccattcacctgcatggctttgccctattctgttggctacctggatttctagagttggtcgacaactaggcaggtgttctagttcatatctgcagctgagggagactgtttacatagcacttactcttttaaccacatcccttagctcagaatgaggtgtttcttgtattcaaagcatgcgtctgaactaaactgcattttgatcctgaaatcacttggggccatatccaagatgcctttgttcacattaatgaagggcaaatgaatcccaagtccttgccatataactttggaatgtgtgatgtgcttttcctcctccattagatctactctcctagcttgtgctgtccagttgatagggggcatttaaatccctcaaacacccacacatggagggcaagggcaggcagcctgaaatctggtgggtgtgacaaggcaaccgtggacaatcacagggagagtaaaagtcacatgggcaagcaggagtgctcataaactaattctgggctgggattcaatccatcataggcttccacggacttctgtttcccatggtgtggcacctaccttccaggagtgtttcctgtggattttggaaaagcctgttttctcccccaggtataaatgtttctttcccatttgtttttcagcctcagaaagcatggtctccggccccgccatcatggaggatgatgaccaggaagtcgattcagcagatgaatctgtctccaatgatatgatgacagcgacggatgagccctccaagatgtcatcggccaccgggcgccgaatccggcgctttaagcaggaatggctgaagaagttctggttcctgcggtactccccaaccctcaatgagatgtggtgccacgtctgccgccagtacacggtgcagtcctcacgcacctcggccttcatcattggctccaagcagtttaagattcacaccatcaaacttcacagccagagcaacctgcacaagaagtgcctgcaactgtacaagctccgcatgcacccggagaagacagaggagatgtgtcgcaacatgaccctgctcttcaacaccgcctaccacctggccttggagggcaggccctacctggacttccggcccctggcggagctgctgaggaagtgtgagctcaaggtggtggaccagtacatgaatgagggagactgccagatcctcatccatcacatcgcccgggccctgcgggaagacctggtggagcgcatccgccagtcaccttgcctcagcgtcatcctggatgggcagagcgacgacctgctggccgacacggtggctgtctatgttcagtacaccagcagtgatgggcccccggccacagagttcctgtccctgcaggagctgggattctctagcacagaaagctatctccaggcacttgaccgggccttctcggccttgggcatccggttgcaggatgaaaagccaactgttggcttgggtgtagacggagccaacatcacagccagcctccgtgccagcatgttcatgaccatccgcaagacgctgccctggctgctgtgcctgcccttcatggtgcaccggccccacctggagatcctggatgccatcagcgggaaggagctcccatgcctggaggagctggagaacaacctgaagcagctgctgagcttctaccgctactcaccgcgcctcatgtgcgagctgcggtccacggcggccaccctttgtgaggagacagagttcctgggcgatatccgggcagtgcggtggatcatcggcgagcagaacgtcctcaacgctctcatcaaggactacctggaggtggtggcccatctcaaggaggtcagcagccagacccagcgggcagacgcctcggccatcgcactggccctgctgcagttcctcatggactaccagtccatcaagctcatctacttcctgctggacgtgattgctgtgctctcgcgtctggcctacatcttccagggcgagtacctgctggtgtcccaggtggatgacaagatcgaggaggccatccaggagatcagccggctggctgactccccgggagaatacctgcaggagttcgaggagaatttccgagagagcttcaacgggatcgccatgaagaacctcagggtggctgaagccaagttccagtccatcagggagaagatctgccagaagacccaggtcatcctggctcagaggttcgactcccgcagccggatctttgtgaaggcctgccaggtgtttgacctggctgcctggcccaggagcagtgaggagctgatgagctatggcaaggaggatatggtgcaaatatttgatcacctggaggccatcccgaccttttcccgggatgtctgtagggaagggctggacccccggggtagtctgttgatggagtggcgagaactcaaggccgattactacaccaaaaatggcttcaaagacctgatcagccacatttgcaagtacaaacagaggtttccactcttgaacaagatcatccaggttcttaaagtcctccccacttccaccgcttgctgcgagaaaggccgcaatgccctccagcgagttcgcaaaaaccaccgctcccgcctgaccctggagcagcttagcgacctgttgacaatcgctgtaaacggaccgccaatcaccaactttgatgccaagcgagccctggacagctggtttgaggagaagtctgggaacagttacgcgctgtctgcagaagtcctcagtaggatgtctgcgctggagcagaagccagcactacagaccatggaccacgggacggagttttaccccgacatttagggagctggcgctgcagagttcactaagctgttgaatatttttttaatctatactcataagctttgatatattatataaatatatattatattatattatattatatatatatatatatataaactcacactgaaaatttttaaaaaccaaggtgacgcgtccaccagaagccactgggagatttcagaaaggaaaaatgttggaaactgactcttgtctacaaaatttggcagctgcaacatacatggcaactcattttcactcacagaagcacgtgctggggcctcctgtgttcccaccttactgtccaccaacagcataagctaaaatgacaggtctctgtcatcacctttaggtagctcattttgtttatgttttcatttgcgggtggcggggctctgggtttgggtttatgttcttgccttttcttttttcatttggttttatgatgggagggagctcctcagcctcctcattgacattctggtccggctgaatcagatctctgacttaagtcagggtgggttgtctgtctgcatttgggaggcaggggggttgacctttctccctccccacctgacttcagcttgagatctttttttattcatttcctgatgagggttccttcactgtcctacaaacaaaagtgtcggtcaaactgtgacactgccacacctcacctctgttgcctcgtccatccctgggttgtggatcccttccttccagccccccctggaaactcacaatattacccattatactgaaggcaacattgcctcaccgctgagcttgaaatcctggggaagggagaaggggtaagcttttagcattcctgtttttacgaggtggaggataaaacaatataattccattccaatccagggcttttggggagatgaagagccaagaagtccagaccccaacaggggagtgatttttggctaaaaaacaaggaaaatgaaaagtacatattcgagttacatggattatttatactttttctttataatcatatcatgtgttgagggtattttttttcctttaataatcaagaaatgcctgctatagttcagtggcaggtagtgtcaatgcaaattgtgccctaagttatgcataactcaaatgagagtctgtagagatgtggtcctccttttgcaacaaggctgataacatgctacatggtcataggaaactggggaatgtgtctctgcctgtaaactcttccttttttgaacagggtagagatgtcctaaagaaatggagaaaagaagagaggactctcaaggcatcagcctacacagacacacacacacacacagacacacacacacacacacagacacacacacacacacacaatcacaatatacaatataagctttagaaatagccacttgcctattccctggggcaagtagtggtttaaactagaggagtctgatcaatgctctttcattcatttaactaccggtatacctcgcaagggagttttaaaaaatgtgcgtgagctgttaaaaacttctgttcatgttcctacatctgatttatgcatattttatatgcagagatcctatcacgtggatgcaggtcattttgggggagggaggaagatctgaattatatacatgtggtcagttctgctgagagcttcatctcttggttggcagagggtggtgttatctggccacaggcaaggccccaatgtcttcagcctgcttggttcagacattataaaactgtggtggcttccttccttcttggtttatgttgtctctgaggcctcatgccaccgttgagaaccatagtggaaatgtcatcaacactgaacatgttatagccctttcttggttccaccagtcccttcatcccctaccaatcccttccccttcacctccatggtcttggtgctaagataactttagaatcattgctgctagtcaatagcttttcattatataaatatattatatatattatatattatttttgaaatatttttgtttgttttcaacagtgatgtagcatgttaaaaaacaaaaaacaaaaaaaaatgggttcctccaactgtcccactgccaggcctcatatgctgccttcttcaacaaatcaatgcacccctgcctggtgacatccaccccacctcccaacccagttgcacacatgcttccctaccctcctctgagcaagaagacagttagcaggaactagcaaggaaaggctgaaagcctccttctgaggctttgagattcccagccccattccacttccccactttaaactgatgtctccctccatctgctcctcccatcagggtcaaaacctaactgtggtcaaatgggatgctgttgcaaagcaccaggtcccacctggcccagccccagccttgggacttcctctcccctcacacacgcaaactgctgtgtctggggagttttcactgaacattgcagagactaagaagggttgagggcagagatggctagcaagacagggcttggtgagggcagaaacagtaggttgagatcctttcttctagccaacagttgccttacaccttacattgggtaatgggtagggaggagcaggctaaggctcccgctcatttgaaaaccaggaagagagaaccagtgtcttcctgagcacctggtcagttggagctactctttttcctctcaagagatcatggccaaaatgagctaaaatcttcagctagaaggggaaaagcttatgggccagtgccagtgcctaccctgtagttcctgagaaagctgagagcaggtgacccacttctggcctagcagaatgagctgctatgcacagcatgcagctgcaggggtcacttcctgagctggccaccagacctcggaaaagctaacctctcaggtggtcttgaagttaggttagggcatccctaaaactctgggtgcttgtggcttctgctgaatttagccatgccagggctgtggcagacactctgtaggccacactgccatgggacagggaataatttgggtgatacaccactgcaatttacacggggtctcttctcagcttggatgctccctgggaggcccagtgcttctgtcctgtgaattctgcatgtgattacccatgatttctgtcataggcatttcccactcttctgcttgcttgagaaggacttggactgatgggacactcagggtctagcccagggagcatatgcttggctaacctaatctccccttgatgtgtatacagaactgtggaaaagcagttggtggatcccaaatgttgttacttcagacaagacagagccctttaactcagcctctggcttaggagtgatgactacaggcttagaatgaagtgtgtctctggggctgagacttggcataactgggctggctgattagtgactttctttggctcgtagggttggtgggaagtgagatcaaccttgaggcccaggtttgtggccaactgtgccaaggtgatacctggcagagcctgggagccagagcccttatgattaatatgatctgcttttccttcatggaggacaaagaaaaaatccactgccatctagtatctgtgaaacatgaggacagcgcagtcaagtctgtaactcttgccatgtcagaatccccaagttttgcctgcctggttgaatatgagagtccaggcatcagaaacagcagccttatttaatttaatttttctaatgactggcctatgacaccttgtgatgctaggcacatcctcatttccccatcctcacttgggactgagagcaggctcaagttccagggtccctggatggcaaggttcagtgctgggccctggaatctatggcacttgggggtctctgacctcagcctctgccacatgtttccaagttgagttgttttgctgaggtggtcctccccttgagttgcttatgccaaccctttaatttaggaaaagtaccttgtaattacttaaggtaatgtttaaatgttttccattcatttggaggtggtgccaacaggggggaaagcatgcagaaggctggaaacaatagctgagaccctactgtgggcccacagccctggcccagccggcactgaggggctggtgccatgttacttgatcacctggagcctgatgggacccaggaggtggcctgaggggatgaagtataacttccctcttctggatcccccctttcattttccttctaccccctctaggaatgggagttctagacctaggtctgcttttggctttcagtctgggttgatttccaagtcgaattcatgctttttcttggcccataggtccaattttggcagaaggcattggacttgtgccccctccctgcttcaagaggcagatctagccaggccaggctgaaacagctgaaacaggcaggccagtcctcctcagacaagaaaggggttttcagagggcagtggtgtgcccattccagacaccagtcttctggggaggtggtgccgtgtcatgggttctagtctggcctcttcctcagtcctcaggaggacccaagagactggcacggcccttctcctgcttggagggaaacccatctcccacttggtgggggcccttctcttgccatctgttggttagggtgcttgagctgagtggatggtgctgtgatatttttaaggagcctttcaggcaatgtttgcatgttagccagagggagaaaaagtgcccttttgggaggaaaatggtacgcccctccacttccatctggcactcccttcccccccaccccctcaagtggtatcaccctggaaatacctatgcaatccagtctccctaggagagagtgcatggaagcaggggtatgtgcagtgtagaatacagatgctacagcatatatgttgtatatatggacatatacagtacgtatacacacagagtaagagagtaaatcacgtctatatatctataaataatatcctatatatttatacatttctatgttttaaatagatataaaaatagagtctatagagctgggagagcagtgggaagcctggcgctgtgctgtgcaaaggggaagggagcacggccttcggagagggagccggggaaggccagcaggcagggttggctggcaagggggcctcctacccggagtgttggagaggagagtggctgggtcccggctcgctccatgcactttctctccttttccacaggcttggtctgaggttggaaggagataccccctgagctccagctgaggtgccccctacctctccccacccccacagcccacgcttaggcggtcactgctgcttggcagtaggacgtggtctctgactcctggtggagggaccactgcacaaactccttcaaaaccctcccccaccaggactgagcagcgtcagtggcaataggaaaggtccaaactggatcaagagctggtccaggaaagataccgcccctgccctgttagatgcttctgctgcccctagaggccaagcccctgaagtgcagccgtcctggcctccctcacttgctcaaccactgtcaggaggagaggatgtgggcagcatgagcatcgccaggcagcgctgcccaccatccacaggctttctggccagggcagggggcatcagctagcaggaaacggtgggagagacatatctgcacactcataaattcaatggctactccagtccagaagcagggctttggcccagcccgctccgcgcagcagctgctgctggctgtactcaggacaacgctgttccccctccctcacagaggccccgtggcccctaccccactcccgccgtaacaggcaggtttagttcacatacactgttcgcattctgtgacttgaggcagaggctgagctgggataccccaagctcatccactttcgttggggagggcccctccctgggtttatcaccagctcctagcccgggccgggcggggatgtctgggggccacgcgggggcactggtgcaagctggcagcatgacagagggcttgtgcagccctgacgggacccagaagcccatttgctcgcagtttcctctctctgtttttttcctcctggaggtaggagagagggcctgaccaggcaccagatgatggagcaagggcagctgcatgctccctctctccagaccagccttctgcttttggggtccgaaggggcatttgctcccatcctgagcctcctctgcccctgtcttgctcttccctaccatcctacaagtacctcagtctccagcaggcccacccctccacctgcagcccagggcgggtctgttctgccaatgcccacctccttgagccacagttagctgccaactgggtcttgggacaccctccagtacctggctcaagagagaccaggccgggccgagccttcttcccactgcagtggactagacccacggccaggggatgggcatccccaggtagcaatcccacaatgcactgtacctcagagagagagcacgccaggggcaccaagggaccgagccctctgtccagagggggacagcggtcacaatactgctcaccaaaagacaaaggccaggctgccctcgggcacctctcagtcttcacttttgtctctccggaagaaccagcagtctgattccgtctatttcagcccccgtctctctcttctccacccccacgctgctgaaccattttcatgtcaatcacaaaggaaaaataagtggggatggggggaaatacctaggagtctattatcacatacatattaatatgttaatactttctttaaaaaaaacctcttgatgttattattttgcagactacgctttatagtacctgtgtgacgggacctagaacactggatacaaatagagctatgttggtttatcataatatgtacgcagaaactttctttttgtcatattatccttgtaatgtaagaagattgttaataaaagcatttaaatttactcaccactgttgaattgctgcctccttgcctctatccccggcctgtgctctggttgactcagaacgggccccaccacaagggctcaggtgtcagaataggagcttgcctgctgccaggttggaaggaactagaagaggccactagccccttcttgctgctctcattgttcccccattagagtctctttccagcaagtaacctacgtgcctcgcccaccaggcaggccaaaagaggtgtgaccgaaaccgtttaaaataaatctctctgcccccatatgcattcatcccacaagaatctcctggaggcagcacacaagggctgtt

SEQ ID NO: 1629 - DNA, 2208 bp, Homo sapiens
gtcttgaggaccatctctcccggcagcataccgtgtggcttcacactgctctgcctctctgaacctcggtttcttcatctataaaatgggaataagagtaagccacctcaatggactgtgggaggcttaagtaaattgaagtgccatgcaagtagctagcatgcagttgcagctcaatgaatattatgatggccgcagatacgatggctacagctggggcacccatttcgggtcacaaggtagggttcaatgttgaagatggcagagccaattgcatccctgatgatcgtggagtgccgggcctgcctgagatgctcacctctcttcctttaccagagagagaaagacagaatgaccgagaacatgaaggagtgcttggcccagaccaatgcagccgtgggggatatggtgacggtggtgaatccgagccaggagtatggccagccctgctctaggagaccggactcctcggccatggaagttgagcccaagaaactgaaagggaagcgcgacctcatcgtgcccaaaagcttccagcaagtggacttctggttttgtgagtcctgccaggagtacttcgtggatgaatgcccaaaccatggccccccggtgtttgtgtctgacacaccggtgcccgtgggcatcccagaccgggcggcgctcaccatcccacagggcatggaggtggtcaaggacactagtggagagagtgacgtgcgatgtgtaaacgaggtcatccccaagggccacatcttcggcccctatgaggggcagatctccacccaggacaaatcagctggcttcttctcctggctgattgtggacaagaacaaccgctataagtccatagatggctcagacgagaccgaagccaactggatgaggtacgtggtcatctcccgggaggagagggagcagaacctgctggcgttccagcacagtgagcgcatctacttccgggcgtgcagggacatccggcctggggagtggctgcgggtctggtacagcgaggactacatgaagcgcctgcacagcatgtcccaggaaaccattcaccgcaacctggccagaggagagaagaggttgcagagggagaagtctgagcaggttctggataacccagaagacctgaggggtcccattcatctctctgtgctgagacagggcaaaagtccctacaagcgtggcttcgatgagggggatgtacacccccaagctaagaagaagaaaattgacctgattttcaaggatgttctggaggcctcactggaatctgcgaaggtggaagcccaccagttggccctgagcacctcactggtcatcaggaaagtccccaaataccaggatgacgcctacagtcagtgtgcaacaacaatgacccatggtgtgcagaatataggccagacccagggggagggggactggaaggtcccccagggggtctccaaggagccaggccaattggaggatgaagaagaggagccttcatcattcaaggccgacagtcctgccgaggcctcccttgcatctgaccctcatgaacttcccaccacctctttttgccctaactgtattcgcctaaagaagaaggttcgggagctccaggcagaattagacatgcttaagtctgggaaacttcctgagccccccgtattgccaccacaggtactggagctcccagagttctcggaccctgcaggtaagttggtttggatgagattattgtcggagggcagagtacgcagtgggctgtgtggagggtagcctaaagctctctgtggaaaccaccttccgggagacctgaggagtgtaacgtggaggcggctacctccgtgggtgggagcccaggtcctcagtgtctctggcagacccatcggcagctctgccaggtgctccatgtgttgcccttgtatcctccttgtcaataaaggaagttccgctgcagaaggggtgtgtgctgtgttcttgacccgttgcctttctctggtactggtgtcttaccccaaagcccaatttctaaacccagtctttctctgtccccagtctcaagcagggtgtcccactggagagatctcttggcttccctaacttagtccaggaacacagccttgttcttctcttcctgaatctctgtcctgccacacatggtcccagttccctagcctggagttctagaaggatggagagtgaggggatccaggccattca

SEQ ID NO: 1630 - DNA, 1515 bp, Homo sapiens
atgttgaagatggcagagccaattgcatccctgatgatcgtggagtgccgggcctgcctgagatgctcacctctcttcctttaccagagagagaaagacagaatgaccgagaacatgaaggagtgcttggcccagaccaatgcagccgtgggggatatggtgacggtggtgaatccgagccaggagtatggccagccctgctctaggagaccggactcctcggccatggaagttgagcccaagaaactgaaagggaagcgcgacctcatcgtgcccaaaagcttccagcaagtggacttctggttttgtgagtcctgccaggagtacttcgtggatgaatgcccaaaccatggccccccggtgtttgtgtctgacacaccggtgcccgtgggcatcccagaccgggcggcgctcaccatcccacagggcatggaggtggtcaaggacactagtggagagagtgacgtgcgatgtgtaaacgaggtcatccccaagggccacatcttcggcccctatgaggggcagatctccacccaggacaaatcagctggcttcttctcctggctgattgtggacaagaacaaccgctataagtccatagatggctcagacgagaccgaagccaactggatgaggtacgtggtcatctcccgggaggagagggagcagaacctgctggcgttccagcacagtgagcgcatctacttccgggcgtgcagggacatccggcctggggagtggctgcgggtctggtacagcgaggactacatgaagcgcctgcacagcatgtcccaggaaaccattcaccgcaacctggccagaggagagaagaggttgcagagggagaagtctgagcaggttctggataacccagaagacctgaggggtcccattcatctctctgtgctgagacagggcaaaagtccctacaagcgtggcttcgatgagggggatgtacacccccaagctaagaagaagaaaattgacctgattttcaaggatgttctggaggcctcactggaatctgcgaaggtggaagcccaccagttggccctgagcacctcactggtcatcaggaaagtccccaaataccaggatgacgcctacagtcagtgtgcaacaacaatgacccatggtgtgcagaatataggccagacccagggggagggggactggaaggtcccccagggggtctccaaggagccaggccaattggaggatgaagaagaggagccttcatcattcaaggccgacagtcctgccgaggcctcccttgcatctgaccctcatgaacttcccaccacctctttttgccctaactgtattcgcctaaagaagaaggttcgggagctccaggcagaattagacatgcttaagtctgggaaacttcctgagccccccgtattgccaccacaggtactggagctcccagagttctcggaccctgcaggtaagttggtttggatgagattattgtcggagggcagagtacgcagtgggctgtgtggagggtag

SEQ ID NO: 1631 - DNA, 93483 bp, Mus musculus
ttgaactcctgtctctatgtacccagctgcttgtgaataaactctatttttccgaagcttgttatcttagggtttcaattgatgtaacaaaataccgtgaccaaaaggcaagctagagctagagaggaaaaggtttatttggcttagacttccatactgtagtctgttattgaaagtcattgaaggaagccaggacaggcactcaagcagggtaggaacccatggagggggctgcttactggcttgctcaccacccccctcctctttcttttctttttttctttttttggtgttttgagacagggtttctctgtgtcatcctggctgtcctgcagtttgctctgtagactagactggcctcaaactcagagagatctgcctgtctctgcctcctgagtgctgggattaaaggtgcgtgccaccacagcccgacttctcagccttttttcttacagaacctaggaccaccagctgggtgtgagcactcacaatgggctggcccctccttggggcctcacccatcaatcactaattaagaaaatgttctacaggctagcccacagcctgatcttagggaggcatttttctcaaccgaggtttcctcctctcagatgactgcagcttgtgtcaagttgacagaaatctggacagcgcacttgtcgtcccagggatggatgcttggcgcaatggttttgtgaaacaggcctggtggggttgcagaagacagctctcctagcctagagctccggtctctcacctactttcctttgaccgcagaccctgtgacagtgctggagagagtgaatgtccgttcaggcttggagacgctgggttaaggaaaataagcagaccctgagcccatggacagcacccaggtgcttcagaggcttctggaagcttccacagctgcttccggttccttctccttccaccacccccctcctgccctggcttcttctgggacattccatctttcttcaatagcacatcaaaacctggtgccctcctggatactcattttgccaatgcgctcaggcatcctactgggactgcacctggggaagtgaggggaggacggaaggaagtactccccctcttctttgaactatgctttttgatattgttcactgctatgtcctacatggcaaagatggtttccctccaagggaagggcttcctgggctgtagtcaagatgcaaacagtaactactgccgggtgtgctgccatgacaggtgtgctgccatgtgggtgtgctgccatgcaggtgtgctgccatgtgggtgtgctgccatgtggttgtgctgccatgtgggtgtgctgccagggatggagacggactggcctcagctggtgatcctcctttgaggtttcacgtgagctcagccaggtggaggtgcgtccattgcacgtgaatgcgcacacatgactagtgaaaagagtacaggctccatgggcattactctctttctttggggtcttagcacaagacagcttcagactcccagatgcatgagggtggaaagtgaaacattccatttctccactccacacgagtgtggcccccttttctgacaatgagtttgattggctgggtttagagagtttccatttctctctgctctgaatcaaattgtgaggactcttttgcttgaatccaaaaatgaaatgaagggcatcccgcacaaataactttccttaattgttgtttttttttcctagatgacagctgatggagaaacatcgcagtatgaaaatacatatggtacttgtacacacacacacacacacacacacacacagagacacacatacacagacacacacacagacagacagacagacacagacacacacacacacacagacacaccacacctctgttgtatatagccactcagattctttccccctgctgaaaatcacttgacttcctgcagaagaactttctctcacatctgcttctagtggccagtgtatccagggtggttgagccctactttgtaagccaagagcctgaaacatttcttttctgaagtcagtccttcagattccatagggcaaaggacaaactaaaagcatgatgtaggcatttcttttttgtttgtttgtttgcttttcgagacagggtttctctgtgtagccctggctgtcctggaactcactttgtagaccaggctggcctcgaactcagaaatccgcctgcctctgcctcccaagtgctgggattaaaggcgtgtgccaccacaccccgtgatgtaggcatttctataattatttgtaacataaccacttaaaagcaaaaccattttgttgttgtcattctctctctctctctctctctctctctctctctctgtgtgtgtgtgtgtgtgtgtgtgtgtgtgtgcacatgtttgtgtgtatgtgtgccatgcatgcacatgccacagcctgcttgtggcagtcagaggaatattttcaggaattgattttctccctccctcttgggctccatcccgggctcgcacggcaaacactttcaccactggcccatctcctcggccccataagaacgatttctaatgtgtgatcacagtctggccagacttggagcctatacttgtcttttgttgtttcttgccatcaaccaagacagtccctgaggcatcttctggtagatcctgcttcttaccataagtgacagaggtttatggggtggggaacaactttgtctacatttttaaaatgaccacgcgtgcaatggggtagaagggtggagttaaagttcgtctctcttataccaggcccaagcttgtgtgggtcatgcttactttccaagcttgtttctaatcctccttcacagcctctctattcattcagcacaggtcttttcccctgaaggtaattagagctggtttcttccgctgcctcccagagtgacttgactgatgactgatgatgtacatcatagaagatccacgtgtccatcccagtggctcatttgagtgtgctttcagggacacacaaccccagcccatctcagaatcctggatttctacacctcctttccatggaacagttgtggtggtcccaggtcctgagaccctctccagtttggcctgggaatgctcaagtgtttgagtgggccctccttactggcacccttcttcttggggtagaatgacatcagtgcagtagtcaccatgggctcagcctgactgagtaataagaggatctgtttgtgcaattgtctctgcaatgtgcaacacagaatatggcagagactcaagtcaactttgtttggaggaaagggacagcattggctcctgtcactgaagaaggcacgagtgggagtgagcagggacacggctccagcagggacagctgctccagcttctgtctcagtttagctcaggtgacatgctgctacccaatgcctggagctgtcaacctctacctgctcccagtgcaggatcttcattgtcattgggttattggtccatctctgggatgagagcctgcctctgaggtccgctctcagggacacccgtctcaaatacggttcccgaggagcagaactgaagcgtgtttattcaggatcttgcagttggaacattctttgttgactaaaaaggacatagacggaaataaaaatggcattaattctatgccttcttcattgggtctaggtgtcattcatacagctctccatcaggaagctcctagctgctgggttaaaggaaatatgtgtgagctctaggaggtcaagcagtgactttaagatgtctgtctgcatagtccctgtgagttgggccagcagggttcatctaactgtcctcctggggaagtgttctgagatcctaggaacaggtgaagtaccagaaatggtttcaagtgggactgggctagctcactttggggatgagcactgaacgtacattctaaacagacgcccaggtaacacagtaagagctcactgtgtaggcttgcaggtatctgcagagatcctgagaaatgtgggtctgtaaacctgactgaggcggtgagggaatgaagaatggacagagaaatgagagacacgtggatatagaaaagctagggtcaggtgggtcgtgtgcaccctggtggagcggcaccagcttctgtaacaatggggaacctcagtcatttattatgtatggcagggttagctagtattaggtggagctcagtctcagcctgtgaacaggaggaggaagtcatagttgctgtgttcatgcacactggccaatggctagtggatacgagtgaaaggacagaaggagcctttgcctttccaaacctgactcagggaaaagggttggctactacttcccccatgacattgctgtctcatgtaaaatcatgcatgttcattcagagctctcctccctccctacaggtgtccgtgggaagaaacagagagacctagggggaagacagactaggcagagaagagaggagccggcacaggacgctgctggagttctctcaggagggcctgttggaggactgatctcaccccgctgagcggttgctctgtggatctttctggaagtcagttgctaaatgtgggctgctaggtggaggtgggagaacgaagagagcgaccttccagatagtccctgtctgttgagggtgactttactgtacctggtgggatcccaacaggaggatgggtgggtcacattaaagaaggtcttaccgtgggctcagtgaagagatggctcagtggttgggagtacttgccgctcttgcagaggacgtgggttcaattcctggcactcacaaggtggcttacaactgtctgtaactccagttccaggggatccaaggcacttttctggctttcaggaacgacaggtccacacacatgtatgcaggcaaacacttagatacataaaatcatttttaaaacgtctcaccaggccaagtgtggaggccaaagtccttaatccccatactcaagaggcagaagcaggaggatctctgtgaacttgaggccagcctgatctacctagagcgttcaggccagccagggctacattatgtctatccaaaacaaaacaaaaccactctagaactaggtgtgtggagatggccacgggaggaatggaagccgagccccagttgctttgagactgtacttttcgccttctcccattagacttattcttcttgtctgtgttgggggtggcgttcagccttgcttagctttaggtggctttgcccatctcacagttaggccctctattccagaagaaagctgcctgtctcagcaggcatgagctgggccaaagctgccacgtgggctcgggtaagccacaggcctgtgtatctctgacaacagggagtgaagctaaaaatggcgagtcttgtctttctagagaagtctgactcccactctgttcacttcttgccttgaaggcaacggtgcgcagaagttttgcttttaaccacaatccacaagaactgacccagcaagcacacatatacccccattctcaccttgatagctgtctgacatcctttccctggagaggaccttcctattattttctgtcttgtttatttgtttggtttaaagggtctggttatgcctctacacatgaatttctctgcccattgtaaagtcactgctgtaaggcaacatggagtgggggttgcccttcttatgcccaggaagctctcctagcatctcaggctgcttgaggacaaggctgcaagatgttggcagaagacagtggctgcagcttagcagccaccaggctctcgtttttaaaatgtgaatctttctcttctcaccgccatctcccattcaaacaagaaactgtggcctccttatcagttcctgccttccttggaggtagtacttctcagtgcccaggccccataggcagcccttcagcctagctggctctggtgcacacccacccaatccactccaggtgtgtctaatcttccctttccacacagtcagtattggggagcctgctaagctgacgtttgtagtccttgctgagggactgctaagggggccatgtttgcttttcttgctcaatggtcaggctgtgtgaaggaagagcactgttggctactggtcctgacaatctgatctacttcccaaaaacttaaactggacacacaaaaatagtctgtgctgggtgttagaattgaggcttgaggatcgaacctatataaaatgcagtcacatggtaaactcaagcttggctgggaacagagcagggaagcagcagggcagaagccaggtggccatagacagcgctgcatagcctgcaaggagagcagttgttaaggcatttatggactatggctgtgtctagatgctgtggacagaacctgatttgacacggacaggctcctgttcctagtctgtcagaggctcagcaaaggctattagcctgagtcacagatggcctaaggactcagctccccttcaggacttggtcctgttgagggtcctatatttagccagtcatcacaaaactttgtcccacaagccatcaacaagagatatcgctcctcaccaagagggacagatgcccagagctattcacagtcacatgggtttcaggatctcatctggggacaccagggcagaattcttccacatcaacacccagaccactccattgtttctgtgtgtgcacagaccagcaggatagggtggtggtttaaaaaccaaagcctggagagagggctcagaagttaagagcactgtctgctcttccagaggtcctcagttcaagtcccagcaaccacatggtggctcacaaacatctataatgagatctggtgccctcttctggccttaaggcatatgtgcaggcagaatgctgtaaacttaataaatcttaaaacaaaacaaaacaccaaaggccattccctcagaccagtccttaacacccataaaacagctaactcaccagaaccttcattttttgtccatttatttagaaaaaaattaacatgagcaaatgagatacctcagtgttacaacagagtatagaaatgtctagcaataatcaaataatttgatctttaaatacaaaataaccacatgaacacctaatatacaggtttcatctgaatacatatttattagataaatattagaggtcacatcatctaactgcatacagctttgcaagactagaaatcacaattagttttttttttctgaccagtcaaaagtatgaaatgattgcagtgtacatacgatgtacaaagacaagggcgggttctgtggacgtcacttcaggctgcacgtgtgggtgtggatgtgtgtacgtgtgaatcacctgtgatcatgatatcaaaaacttatacaaagtatatgaatttggttacaattttcttctgaaatccccgtttctcttcattgtttccatagcaccctaaaaatacacaggtggcagggccaggacacagaaggtaaatagtacatgtaggtaaaaataaaaacaaaagggaacaaaaacgcctctgcacacagggtcagtatattacaggagacaaggacggagtcacgaaggctaacaaacgggatctagtattccacgtagaatgaaggagttccaagccttttgttgtttctctgttttgtaaaataaaaacaatacacattccgggagaaatgaatgtatcttgttgacatgtctatttctcatttacatatgtacacacggcccttgagtcgctgctgctctctgcctcgtctggattggtcaggcccgagggcccatggggagcagacctgtagctctctgggatttagggcttccgttagggagaaagtgttaggaatcttttaaaaaataaaatggctacaggatacgtgagacatgaataaagcttcaaaccaagaagatgagggtgatcgcctgtgcggggggcggggcctttcccatctgcgcatgctctctcccagcccagccgcttagctgagtggcggctggtacgtgcctatgggtgggttgctcgttgtggtaaagtggcttgctgagacctcatttcggaggttactatggctccaagttgttgtaagaaaggactgaggatctttccagagcctaggcctgcctctgtttatggatgtcacctttacctgcgtctgtcactaccaaggcatggctccagcccccgatgtctttgtagctctctcaaaccctggatcggctccaacatttctctggaaggagacatttccggagtgtgggcttcaggctctgtggtgaacttgctggtgggcacttgcctgggagggagccttaggaaatcagcctcaggtgtagcctcgggtgtgaacggagagatgaccagagaggctgggctactgggaagtgtctaggccttttgcactggaaagctgtggagaacctgggcatgccttgacaggaactagcagggaccccaggctgttctggggcacagtatcacggcaagaagcaggaacttgtgagaaaggcatttgtcagtctgaagctgaacaatccgtacagtccgacagagcacggccctgtgccgggccaccgacactgggtagggatagccacggggtacctggtgtaatgtccctaccagctgactgagagtggttctcaacagtgggttgcctggtctctcaactcgagcacagccgcctcttctgctcctctctcatctgtacaaatagccctggttggtttttgtttgtttttgttgtttgtttttgtttttttaaaaaaggactcgggttttgtcactgagtcaagatattttaaaaacaccagcaaaggctataaccaggtcatgaaaatgttgaatattatcaaagacaatactaaaatattcacaaagatatttacaaaagcgattcttaaaataattgatttgcatactgaacacactgcttgaaaaaaccttaacaacaggacaaaggaagaggaggggtggggaggtggcagctttccttgtgcctttttttttttagggtgacaataagtcaacagctaggggtcacctttctggttcaatctatattaagagtgccagggagcacagagggaggctaatgaccgatgacaaatgaggacgctggcagtggacaggaggcaggagaaggccttgggtggcagcatcggagaagggagcaaagaatttacagatgggactcatgtgagcggacaacctggcatcaccacaggcatcaccgtaggccatgaggctcagggggacacagaccagcctggcacaaagcaggcgagtgacaagccagcaggggactctaagctggatggagtgaaaaagcagaggagggccagaggctgcacttgctgggtgagcaggagtgtggagcgagctctggatggagggagaaatacagggagtgacaggccataaatgccacaaaatgcctgcctgctgagatgctctggtgcacccagcaaaggtctgggctggagacaggcagctttgagcagagaacctgctggaccagactgagagacttggagatccatgaaggccctgctgtggagtcgtttccctgggggcctatgctgcttccctaccatgtgcccctacagctgtctggggaaaggagaacccagagggaagtgggtcccatggaatagtctcagagaaggaagtatgggtaggaggaaggaaagagaacatggggggaaatggcttgcttgctgtccagatacaatgttcctttccttcagagctccttcttcagagctccccgctgcgggtcatttaaaagcagggattggcttggggcaaagctgcaaggccctggctgcttctgtggggctctggctggcatcgtcctctggcctctaactaacggagggctccctttggtgtggtgcacacactctctgctccccgcaaggcatggccctggtctgagttaaggagccctcctctgcattgtcttggctctggggaaggccctgacctgtttcctgccagtccctacaaggtgtggcactctctctcagacacggcactttgtccttgttctgctgagagagtgtttacagggcatcttggcttagaagtcagaggccaaagccacgacccccggccttgagggatggtctcctccccagagggttgtgcttttctgtggtgtgtgtgtgtgtgtgtgcgtgtccttcctcactgctgcaaactgtcaccactcctccaaggcttgtccactaccctggcctgggggccggagcacaggcttctttcgggttccagtcatctgaaggaggctctgggccaagaggcggggataaggtttaaaaacatggaagaactttgggacactggaaggtcggttgtctggagtcagcacacatggagggacctacagtcgccattggcatgtctcttgctgggcctggattccctcagcttgggtttgtcttccaggggccgtcttcaggcttgctctaggcatagatcccagagcattcaggcaaacaggactggagacccacatggctttccctgcctagtgtgctctgctcagctctcagcctgaggtcctggtgtgggaggcctgagcatgggctcctgggaggaataggatgtgggacagatggggtaggaggcagagtggggagggatggccccagtggagagtggccttcagttgttctcaaagagagacaggaggtcatcgttgctattgcttggaaggtcgggggggtccaggtaggaaagaagctcatccgggtttgtgagttccggcagtagctagaaaagaagaagcctcgttgaggtgtctgaggctgctccaggaggagtgagggctctctctggccttctcactcccttccgcttgcctcctggagttctacctcaaagacagaaaacttaacagtgtcaagtatgggcctgccggctgtccccaagaccactgcatctcagctgggggcaggcatacccacactcaacaaatgccaaggccggggagacccactgggctgacccctcctctcaatgtcagccccatggcagatcaagggctggattccttttgattgctcctctgtcctctcagaccctgccaagagcatctttgggtcacacagcctgctggtataagccctcggttttcatccatgaccacaaggcaggccgtgggaagaccagatggtccccacagtgcccgagactactctcctgtaatcttaagtgaactagtggctggccatactgtcctgtccctgtgctcccctgtccccactccccgtgtgacacccttgaagtatgtatgtcacacaggggcagaggagctcctgaatctagaagcatccctcagtctggctaaggaaggagagttgggtgagaaaccaagacatctgcaaactttagacagcactgcagttctccctgccaagagctctttgatgccaccgtggtgggtgttgatagcagggccaggagttcagtacctagggatgggggctggctacagcttccagcccctggcgggggtaggagaggaaagtgtccagtcccaatctttctgtgatgcccaccaccccgccttctatactcctgaggtcttggaatgggagatgcttgagtctcagctgcctagtttgaccctgtctccctcgagtcatgtcctccccacatcatcttctgtcatccgacatggagacttcttggagtgagcaatggagcaagcggaagcagggaatggagacacacggacagggaaaccgcaagcagacaagaccagcaagacgatggtgggtggggtgtcattcttagctcttcccctgcccaggccagaaggtagatacagaaatagcaagcttgacatgggggtgtgagggaggggatgggaagaagggcaaggaccctcttgcactatctccaaggctctgactggagggattggtcaagggcttacgtagaaggtgggtaggaatgaggaacagggctatcgggccaaagggctgatgggtaggggtggggcttgcatgacacacccccatatggggcttcctagtgctagagtcaggggagactggctggggcccatccaccacccacccacctttccacccggggccttgagcccttaagtaccccccttcttttgggaaggtcacggtgccgagcctggccccagaccaaggtgtgtggtgaccccaacttacatccagtgaaggttccggcatgtcggatgctccctgtgctccggcctgaccctctaaggctgaggaggggttaaaggtcaggtcgctgtgtggatggttgccgggagcggcctgtggtggctgccggggaggctgggaaggaggaggagccccactgtgatgtaatggaggccctgcctggctgctggggtgtggtacgtgcaaaccttgttgtatggagggatggggctggtcagaactgccagcgtggggcatctgtggaggaggagagagcaggagaaaagagaggtgaggtgacggaggcacaacgacgggatgcctggagaaaatgaaaaccgaacaaaccaggaagtaacggaccccaaaacgagggcacccctcaacagagaacaatgatccgccgttgagggacggggtagaaaaaaaacaaacaaatcgtcctctccagaaaccaacaaccaggaaggctgtgaagggacaagtggagaaggccttcacaaagcctaggaagggcctcgagccagcacaggccagagagcctcccacccccacactgtcacaacaaacaacagcgaggccagaatggacaagcaaatggacgtgtttctgggaagcggtagctgctggcagcgtggtgcagggccctcccccgaggaccagggcagtgcagagcaggcgtggacacagcacgggcaggcgtgcagctccccctggctggcagtaaagaggagacaggtgctcagcccgcttccctctgggatgaaactcatctgcagtcaaaatggcggaccagggagaaaacctggctggccaggggcatttcagggtactgccttctccttgattagaaatgggcttcatggtgggggtggcaaggaacatggagggacaactctaaaggttagctagggaattccatccttttaacttactccatgctgttgtgggtaggtgggtgtaaggggatcttatgtaagtatgtgcctggtgaatgctgtttgctggtctcagcagacccttcaaagcagaaagcctgaagcggctctgtacatgtccagcaaaggcctcagcctgctctatacatttgcacagggccaccagcaccctcttacatactgccaagaaactatcattttggtgacagaatgcttccttggtctcggatgatttccatctctgccccatctccatttctgggttctcccatgccgggttggcgagtagcgatcacgccagccttgatctcccagaccctagttcctctttccatttctgctaaaagctgttccccaagtctgctttgatctggtctctaccaaaagtcctggtgtgccctttctttgcagggtgcagggctccagtgtgacaccagtattacagtattcttccagtgaccctcatgtggcatggtataaagtggctggaagacaaggccacatagtggtaagaggccagctgagggtacccacttagctcacaacagcagatgtcccatgacacccacccagaggaaacagggagggactccacactctcatgaccagcttagctcaggacagacatctcggatcctatgatatagcttctcccctagacctcaacaagagtgtctcagagccagaagtactgctgttgtgtctgccaatctgctgcctagtgcggggagaactcttgggcaaaccagcgcttggttagaaccttctagagaatcctggactacacaaaaaaccctccagccatctgcccagccagggccagctgcttctagatacaacaaggtagatacaccaagaatagacctggggttgtctccccatgtgatacaatgcgtagctaggcctggttgctttcagtgagatgaaagctgagaaagtaggcacgcctttgtggaattctgggggggagatatgagcttgattcaggtagaagatgaaccaggaagcaaatagcttggctggtaagagagcaaatggctttctctatgtggcatctttcaggatttgtgagtatgaggacttggggtatacagtgtgtgaggggtgatgtcggtgacatcagctgtgttaggccgaggtcctggtgagcttagaggaggagagcagtggctccaagttgagaacttcaaagtcagagtctatatgtacttttctttctcttcctgtcatgttttctttgaggtaggttctcaagcatcgcaaggctgaccttaaacttgctatgtagccagggaatgactctgactttggacactccttccttcacctctgagttttgagatcacacgtgtgtaccctgtcctgtttgcttaggcagctctgcagaagccccctacccaagggagctgtgtcgccaggcattgtactcattcttggtgggaaatcggggatgtaagagaagatgagaagcctccaaccccattactaggcactgaggaaactctggaccttttctggctggtcttcttatctgtgccccttccctccaaggtgagagaccgacatgaatctcagtgtcccaacccccactgctcttcttccatctcggctcggtgtgctttgtgagcacaaggcccgatgtgcccattcatcccgacccaaggggcatttgctatgctacacagagcataacagttgagcattcaaacacagaagggctcaagaggatggccaggtctcttgccactgtttgctgagccacaggaagggacagatagtggttaattctggacatcttactccacagaggtgtccccagtcttgtgggacatgccaataagtgggagacaaggaggacaaacaagccctcaggtaggccagatatcctgggaccgcctttttacaggtggtggtggtgagaccctggtgaagattcagatacccagagactaagtgcctgggagtgggagctaatttcaggaggccagaaacacaggcatcagtggcagagcatagttggagctcaaggtgggcacatgttgatgcagggggcagcctggagctttcttaacttaagagactccaatgcccccaataaaacagccaagttgacaggtatagagcaaccctgtcagcctctccccatctgagcccctgagtctaattcttagtttttcttttcactgaggagggaaccagaggactcacaccacaaagaacccgagggaaagccctctgccccagtcagccagatgaggctggtaggcagcatgggcaaatgggaaggttgaggtacaagctgaaggtactcacagtttcctgcatggggtgactgaggggtttctcgagggcggccatgttgttgggcatgtccggtgggtgcgagagctgggggggaccgtgcatgaagtcgttcatggatgtccctccgggattcccatgggggaagtcaaagttgccatgaccctggtagttgtttcctgggatgggaataagatggggatgggaagaggtcaaccagtgggaaggtggccaccctcagctgatagtataaatgcccaaaggctttccgtcccttgggacaggcaaggctcctgaagcatttgctttgggctacaggatggggcagtcatgcccttatctcatggactggggcactccaggtgtgtgctaaagtcaagtccccaaccccactccagatgtgtgtgtgctctactgttgcagaagggcagaaaggggtctagccaccaggctctagatgataacccagcctctccatctcacacctgatggtgatgatgagacagggagactcagagtgctgggatgccggggcccttggcaaaggctgtgggattccagccagtaaactaatgactctggtccactaatcagtcacctgggcaccttggagacctaaggccatggatctgagtgacaaggccaccaccctcagatagaaggtacacgtgcattttctaggaacagagtggaaagcagcagggatgatgcctgaagtctgggatagcggagagtgagaccaagggataacagactgggttagccaaggctgggccgccagtgcctaggtgttctctgttagagggtgggagagcctaaagggtggaaccgataatctggcagagcaggctgtgcaacctctgagcttccatcatcattctcccaagtccagtgaccgcagggatgtttttgggggtgtgtgttcactctttctcttttatttttaagattgactttttctgtgtatgaggggaatccgttgtccacgtgtatatatgtggttccacgtgtgtgcctgcttcagggggaggttagaagagagcactggatcaccttgaactggagctatggttggttgtgagtcataatggaggttctgggaattgaacctacgcccttctgcaagagcaacaagtgctcttaatgagcgaaccatttctcctgcctcactcagccttttgtttcctcatctgtacccgttatcatcagcacagagatcccaagtccccgatggacccgggattgtacccttcttcctccctccctccttccctggccagcatcacgttacacaccttggctgctgtagtcgttggagctggtgcccccaggaggaggtgggagggggtagggagacgggccagggcccagagcggcgatcatctccatgacattgggcatgatcatctggctggggctcatggttttgaaccgctttgaggggatgccatcggggtcatccttgatgtggaggtctgacttgatgggtactggccgccagctgcacgtggggtcaatggtgacctcttcaaactcggagctgatgggggagagcgagggggaggagctgaggtttagaatgtctagccaatgtcttcactcctcccctgtgccagaactgtgcatgggaccatcttgtttgatgaggtgagaatattgaggcttagaaagacaagtggttgagcctggggctgctggccccaagacaccttccccgccaccctagaggagttccagcacggctgcgttctgtctcatctaagacatattggcccccaagtccgggtattcccaaggtcaagctccagatgggtggctgcccagcaaagtactcaggactgtctatgtctccctccagccaggctgcacctccctagtcgaggccacacttactgttggatggcgttcaggatcccccacatgtactgatccacttccagaccctcgagcagagcagttttactggaagagaagaacagaggcttggtctttgcgcctggaggcaggacacagcccgcccacctccactgtcctgccactgtggatacaatggaggcacagagtgcaatatagcagtgaaatccaaggcccatgcctctgtggggctggttttgcctgaagggtaggtaaagcagctaagaggcccaagaagaggccagagggcacctctgctctgcaaggtgggtattgcttacttgcacacgggacacctccaggtccctcgctcacaattcagttggaggtatgactccaggtcaaagcactgcagaagtgagagacagagagataggtaagatcaggactgtcagaaaatgccttgctgtggctctggactcttgggaagacttcagtgctggggaagaactcttctcttactccatagaaccacagaacagccatgctgtgtctgccacggccctcacagatctcttccctgtcctcgagtaagcccttctggacccaacaccccagccaagtctcactgcttttgcctcttactgaggccgggaccagtgtggactctggcagtccccttaatccatcccagggacccagggtaactctgttgatcagcctgtatcagacaaagcaatcacatcatgtccgtacctacaaactcagagggaggcagtcctgtctgccacttagctttcaggatgaactaactgtgcttcacagtgtggcgatgatggtgtaattggctctgccatccttgcacccctgtcgtgggaccctgtcttggccaacccctacacaaccggtctttgctagtctaggttgcctctttcttgaacctgtggtgtctagccaggactttctgctggcctacgatacctgattgtctatttctgcattactacccctccccagggcctcagagatggacctgaaggagaaaacaagactgagagagcacgagatactggctgccgatggccgcaatgtctctcaggcagcaacaggctctgttggcccttggcctgccccttgtcaccctgctaactctgtacagcctgggcctgctcacctgcacatgcttgcaatcgtggcctcgagcaggcagctgtatgcgccggaatgtgatggggcacttcagagacaccttgatggcggtctgctccacgccatcctccccattgagagttgtgttgcccgaggaggcagccacactgctgaaattccgcttgactgtgagtgaggaggcagagggtgagggctgggtgctccactgaggaaattggatctcagcagctcctaaacacggcttggattccccacccctgcatcccacatgccacacatgccatgtgcaggtgagagagaaaggactaaggaggatcccttttctgaagaacaaaccctacccctgggagcaagaactttctgccaagcttgcagaaacttagtctggtgctgctcctgatttaactgggtcagcaaaaagcccccttaggcgcttttgcacctaactgcaagagtaggaatagaaaccagactgtgtggaggtgttcaggggctggggggggggggggggaggggaaatgtcctaaccccagcaaagattcaaaaaggagtggccttgtcatcactagtagcaagaatagccaccaatctcagaagtcccaggtccgctgctgggcctcacacccacaagctaggtgtctggaattcatgcgtataatcctgtagccttcctcctggtactgggtacatcccagagtcagctaatgagttctctctgactgctccctgcttctcctccacagttaccctgggggtcctagtgccccagcaggcatgggcatccctccacatactcggcctcctgctgacttcacccatccagcggccgctgctgcagcagctgcagagcagctggcctccctgaattgtgattctagtccatattccttgaccctgtttggggccccttttctcctcactgtctttggttttctgtagtgcccatgcttgtccttggtcacacattgaagcagtggactctaggtcccgagcgtatctacgcctcagcagatggccactcccccacccgtggacccctaaaaccttgcagaggtgctggggtgggaaggtaagggatgtgtaagcctgctgatgcctgctgagggtcagctggactttctaagccctcaccctgttgacgctcccttggctgtagctgctgtagctgcttccggaggagaaggtgttgttctgtccattaaactgttctggctgttgaaatgaaatgagacagaggagtaagcagagcagccccgcggcctgactccgctggagacacgagggttctggggaagaaggcaccaagacgggggtctctaggactagtgtggaaagtggaggggcccgagctttgctcctgttaacaatttagtagacattttccacagcagcgatggggattgctgaaatgaacacccttgagcaaagatggcaaacacgctgaagggtaaactcaagacgggttttcccttctgagaatgcattttgcagcaatggaaaaggttaaaggctcagagatcttcatcaaagcagcattgtaaaatcgaaaaatgaggagtgaatatgggaaggatgagctagggtgagatcatcacctccatgggctgctgggcagccattgagacagggacagagacattctataagcaacaagcatacaacatgtgcagggggaacaggctcaagattacagtggtggtcagctttgtctttcagaattgtgcctcctctgccatcattgtctcatgtactgtgaatgaaggagaggaaggctattctgagcccagacacagttgagcactgacagaaagtcaggactgcaccccccactcctaaagctgttacaggtgtgttagttatgtgggtaccctgaagatggaactcaccttgtaatactgccccatgttgactgtggggggtgggtactgtccggtgctgggttggctcggcatcctttgtccagggtagttgggagatgtgagtggccttggggggttaggggtagggtactggcctggctgggtggggaactggctgtttggtccatattgctggtttccatagttgggctgtaggaatggagaaagggcaggggttgtcatggtgatgtgatgtactcagattccaggtctggggcccagctttttttttttttttttttaaagactgattttatggcccatatatattatctgtatgtgcactgtgtgcatgcctagtgcctgtgaaggtcagaggaatgtaccagaatcctggaatcaagagttatggatgattatgagccatcatatggatcctgggaactgatcctggctcctctgcaagagcaataaccaccgagccacctctccagctccccaacttctcttcttagctctatggtctcatgcacacaagacgccctctctacctgtcatagggagagaatgagccagagaatattaaaagcctccacttgctttgacatccagggacactacatgctgcaggtccaggccatatgccatcactccataaaactgtttttttggaaccccacggatgctcagagcttctcagctgtgtctttgaggggttcaatcttaaagtactcctttgtttctcccactgtttgcgtgtgcaccccgatatgtcagggagatgcaggtcacagaatttgttaccaagagctgacaagccatgcagtgaggctgatctggatagcactgtccctacatcctatacagagcaaacatctatctagtgctccattcttagcagcgtcaactatacagctgtgggagaactagccaatgaggagtggggagcacgagagcccctcctagagaagtcactgaggaaggagacagtgccacctccttccatcttccctagctggaacagtggatgatctagggcttcctgtcacctaggtacccagaacatggtgtcccagagtcaatggttctttgatgtctattcaagaatattccctgtcagagagtctcatcctctaggcttaaatctagttggtgagagtgcgccaagtgcctgagagtgctcatcagagtggactgtgctcaggaactttcaatgactgtacggtggggggacatctgctactctgggccacagcgagttctcacggtggtgtgaagtggctggtacctgcatgttcaccaggctacaggagtgtggtaggggaccagacaacatgattgaagcctgaattaaggatgtaccttttttgttgttttgttttgttgacacaagatttctctgtgtagctctggttatctcagaacttgctcggtagaccaggctagcctagaactcatagatctgtttgcctctgcctcccaagtactgagattaaaggcatataccaccaatgcctggctaggttgtaccacttctaacataggatgaacatactgccatgaggtagaagccagagctcccagcatcttataacctggaccagctgggaagcagcaatgctctggggagaactcctttagtaaaagcagagggcttggcttcaatgtagggctttcaatatgcaattcttctgcggcctcatctcaggtgagcagcctgaagctcagacatgcatgcccagtgcagccaactatctctcaggaggttgagggtagagggtgtttagtgactgtgttctgggagtgaagccatcagcttaaggccccaaaccaaggacaggcagggctgggaggagcctaaaggcctttgagtttctctccctagtgcccactaggtcgaggctcaggtcttgagttggcctcctgggtgtacaggaagcctaatcactatagcctattcctgagtctcaggcttagggcacctataccaattatgacatcatccaacctctgtgagagtggcggctgaagggacctgtggggacagagagcttatgctttcgtgggatagaaatctgcttcagctcaagttgaaggccacagtcttgaccagccagaaggacatgatctgagaagatgaagagctgaggtgccatgcccaggaaggggcatcatggtgtgccaaagacaaacttcactggagcgaggggggcgcatcagctgggcacggatcttggtctcagttgtattctgagtgtcactgagacctggtgacttcccttttcccctgaccttccacggtgcttgggaccgtctgctgggatggtttcctctggcacctctgctaggagaccccagagaaggcaccatccccaggagagcaatatgatggaagtaagccctagggatactgtgtgccatccgatggcctccctgacacacacagcctgtactagtgtactagtggcagccctcactctctaggtggctccctgcactgaggtcctcatccagggtcatccattagtatctgagtatggacagggttaagtggtctccatggtttctgcttctacacttgcctgctctaggcagggtattttacaatgtcacggccccctgtcctctgggcattctaagggccagtgtggattgtgaataccattgatttaaagtcatacacactcaggtgtagtgacttgtttggtgttttccacaacagagatgatattagtcaggggctaagcctccaaagccctttagttcaagttctctaagtggcctaactgtgccttttccaaggtccctgggtccatggtccctctgtcaatgttccttctcctcccatcccccatcatagtcacacttacctctcccgggtatggcctctttatgctctgaataggaagggactggggccgggggcctgggtaggtctgctggggcatcctttgcccgtgtgtgccaaaggggctgatgccgggtggtcggggctggttcatgcccatgggagggccgctcatgcccgagggtgtcatgccagctgccatgccggcagggttcaggctgccccccatggaggcaggcccccgaggcccgggttggttcatgaattggctgttatacgcctgggtgggacccatctggaaagaggaacacaccttcaacgggagaagaagaaaaaaaaaagaataaaatgccacatgcattgaaagtgcagggaaggaaggtagggggctaaagggagagcagcactttcccacagggctgcagttaagagccaggagctcttaaaggacccagtcctccagggctcactactgccctctgcaggtctcatgggaaaatgcagctggtgggtttgggtagggcagggagcagtcactccaaggcacaggcagcattcccagggaggcaggcaggggacatggaagtgggtagggatgggagggacacagggaggacacaggaagaggaggcggatgaggatggaggctgaagccctttcctgaaagccctggccttgcccttggtcagtagccaatggagacacaccctccatacactaagtgtgatttacccagcccacttcctcctgctcaccctgcacccttccacccacacacaacactcttttaaggggcttccaaggatacccgtggcattaacgctcaagatttccccagcctgggtgaggccaggccagcgggcaggaacccttaccggtccatactggtttatatccttgttctgtgtctcttgcaaggctgccactgtagctgtggctgtggctgtggctgtggcagcggcggctgctactgcagctgctgcagcagcggccgctggctgggtgaagtcagcaggaggccgagtatgtggagggatgcccatgcctgctggggcactaggacccccagggtaactgtggaggagaagcagggagcagtcagagagaactcattagctgactctgggatgtacccagtaccaggaggaaggctacaggattatacgcatgaattccagacacctagcttgtgggtgtgaggcccagtagcggacctgggacttctgaggttggtggctattcttgctactagtgatgacaaggccactcctttttgaatctttgctggggctaggacatttccatagcttctctgcttttccttggtcaccacagactaccttctaagcaaacattgacctgagaattgtatggtgctgtgtgctgtagatgtggattgaggtgtgtgagactcctgtgttgaactgcgaggctagaaacccagcaactttgccccgagagctaggtggagtgtgctcaaggtggcttgggctgcttctgtcccttcttcactgtgatctgaggttggggactctagcctccatttcttcttcattcaggtcagtgagctttctaaggagttttggacagatggagctcactgccactgctctccaatcctgcctgctcaccccactgtcttagcataaaggtacacggctgagaaggaactgaggaagtatcccctctacccctgggaggttgatgccaatctgctaagacacatggcagaactgtcctcatatcctagaccaggccatgtggaactggcattcaagtaagagtccttcctggatgtaggtaggaaggcagggctaacacaatgctgtagaagggcaccatctaggttggtcactcacctggccccaaagcccccgctaccagggtagccaggtcggccgtacatgttgggctggatatagggctgtgcagggccagctttggtggagaactgttgctgttgccctgcgaactgtggggagttgatgccggggttgctggtgctcatgcctgatgccatggggttgccacctggattcatagggttgttggcattggccatagggttcccgaggacctgcaaacagagagaaagagagagagagagagggggagagagagagagagagagagagactgtcattaaggtcggtacctgaggcagcgtggagaaagagaagacaaagactgaaacatggcagggaagacacagcagaggagcatgggagtggcttgaagagtccccagaacacgtaagggatcaaagggagtgggctgagaatgtcagccaggaaggagtgaggccaaggctcacaaagccagcccaagtggtccccatggctgcagagatagatctgaggcaagcgaagtctttggcaaacattagcctactcggtcccaactctacaatagggcttggtggacgccctgggctgctgctctaaaaaagacacctctgtgtctttggcccagatgttgtctgtggatgaagacccagggaagcatgacagctcccccccaggatggcctggcctaggtccggcagaggggggccctctgttaggaaggaggtgaggagagagaaaagaagaggaaacaagaatagcatgtctgggaagacagctgggcttgtcaggctaaggcaccctttactgagaggtgacatcttaggaaaacctaatccagaccattcagggccaaaggtttccagcttagaaccctgaggtcagtaacgcccagtaacgctcttgtttgcacaactggagggaacaaggtctcagaacagtactcatggccttgtcacataaacacccttcctcttctatcccagaaggccctacaatgggggatgatcctcagggacccagctgtgtccctactgagacagctgtgtaccctttccggagtgatgctgtctgcagctggatatgtcctgagactgtcttcagtgaggagagtgtcacggcacggttctctggagaacccccctccccactcttgggaggaataagagacacttgtgcctaggagggaccatggtagaggatgggacaagttcttacctgactctgggatgtgttggtcactccccacaccgtggtgaccacggagagggagccgggaggctgattggtgttctgctgccaagggacagagtcataaggaaatgacccatcactgcaaagagagaagaggtccttagagctggggcaaggcctaggtggcagtgtcttcacttcactatcccagccgacctttgccccagtgagctctggggctccaggctcatgacagcacttgtataatgggaatgggccaggcagatgtgaccctctcccaacaatgcaggggctacccctgtgttagctgtgtaagctgggtgggtctacagtccagcagctatgcagtgaagaagccagctagtgcgatcgaaagctcactctaagtcccttcttcaagtataccgatttcccatgaccccctatagaaacagtcaggacctcggcattgtcttcactggggacagcctggttccaactttaatgaggctggaagggccttggtggaatcttgcttctgtccttgttctcagcacctcatgacaaactagctgctgaactgagtcccactgacctggacttcggaattcaggcttgggtcacccttcctctgggcccaggaccaggcctgcccaggtgccccgccccacctcccagtcctgtgcacatccctgcctggctgaaaccttcccttccctacaagtcagcatcatcaggctccagggtttactgggtaaagtccagatgcactccagacagaacgatctatcccactggctcgtccctgagccttcaccaagcctcctcactccagccctgcagtgggctgctgatacagggagctcttcccaaggagccctcagggatctatctacctcctctactcagtaagtctcaggcttacagagaacactcagaaaggccttctagccagccagggtgatgtgggaggagcacaaggggtccagagtgatggacagcattgagacttgccagggtccctaggcccactctagatcacccttacttcctcagtgagagccgtaaaacactgtacctgtgccccagagcagcagaaaatctcgtgtggcaccctcttccctgggtctgcctccactggtctgtgctgacttgcttcctgtttctctggaaagtcgcctctttggaaagccttcccacctctcggaatataaaggagcaacccaccctgttctttacgtatttttcatgacacttatcacacatttgattattatcttcctagcctctactccagaacctggagtgagaggaatccagcagttttatgggacagagtggattaaaggccaggggacaaacaagctagccaggagccaggccctgaactggccccgagagtggagaagcactcctgaacaagccctgtattttctaagctggggtgactgaacactgtggcctgcgctctcattgttcatggtggtcagagagtaacctactatcttaagctgttctggcccctgctgcctggtcaggtatccgccgacctggaaattagtcctgaacccatccctcactagctgaccctgcaagtcttccttggggcactctcatttttgagcacatgccctcatgccttgtccaaatacaggagtgggtcctggtgctcagtagcatgagggagcagaacacagtgacaaacggggtcgtagcttggttgggagagtgcctgcctagcatgcacgaagcctatgctttgctctccatcactgcacagacacgcccggagagaaatatttacagttaccctattatctcagaggagaagacgggagaatcggaggttcaaggttatccttggctacatggaaagtttgggtctagcctgggctgtatgaagccccgtctcaaaaacaaaacaaaacaataaccctaaactctaaacccaaactaaacaacacaaaacacaggcgggagatggctcagtagttaagagcactgactgctcttccaaaggtcttgagttcaaatcccagtaaccacatggtggctcacaaccatctgtaatgagatctgatgccctcttctggggagtctgaagacagctacagtgtatttacatataataaataaatcttaaaaaaaaaaacaaccacagtgcagatgaataaatactgttctctcaacacaccggccactgtggactaagaatcagtaccaagaggctcagtcaagaacacaatgtgagcacaggccttggggtctgagcagcacattctccaagaggataagagtgaagcaggctcagtattcttggtgtccaaggagggggatatcagggctagactggagagagaaacggcatggctcaggagcagggcccaggagcacaggtggctgactgaggactaaatgcagcttgtgaaagtgaggcctgtggccaggcaagaagggaggggctgagccacagatggcataaagtacctggctgggacaccctgcagagcgtgttttcacagaaaagggagacctctggccatccattatccttctggattcccagctctggtatgctggacagaggttctcgagtgaccgatctcgagtgaccgaataaagcaaaaaagtctgtctttcccccaccacaccccacccttcagaactgctttacaaactccctaccaccttccaggctcgtgaagatttgattcaggttttaacaagcagctggacaggtccaggggggaggggggccccctgtctctcatcatcttggctcccaggctactgtatctaaggcccctactaccctcagcaccatggctgggccttgtgggaggaaaccaccttttcctgttctgcctaccactgacagagtacaaagctagccaacatttcccaagtgggctctccactgcctggccagtaggttccctgtctcagaacaaaggtggccatctacttagtgtgcacagggcccgggggctgctggacgcatgctggagaagcaagtgacaggcacaaggggggcggacccaggcctcacgacagaagtggcatccaccagcacactgtgactcatcgccttctaagggctctgactcgacaggcaaccacagcatcaggcctgtgatgtgtcacctctgcctggactctcacccctgtctctgcaaaccaaggacaaaccaagctcctgtgccagcagggaaaagggactggagtgggaggggactgagtggcaaaaggtgtcagggagaagggctctgggagatgcatgccaggcctttgggagaggcgtaagcactggccagtctcagtgatcagcactgttagtgacctgaggctcctcctctgagcttttcttattaattaattaactaattaattaaatggtgtgatggtgcttaagtttaatcccagcactcaggaggcagaggcaggtgaatttccagaggccaggttggtttacataatgagttccaggtcagccagagctacacagtaagaccctgtcttggaaaagggaattgtgtgtgcgtgtgtgtagaaacactaggccacagcacacatgcgtaggtcagaggacaacctgtgggagttggttctctccctccatgatgttggttccaggagatcaaacaaagtagttgtcaggtgcctttgtccactgggctacctcagtggccgtttttgctctcttgttaaaaataattttctggggtgggggcaagaagagcctactaccaacagagcctggtacagctgtgcaaaaaataacaactcatacaacttgtgtttttccttttgttttgagacacagcctcactatgtagcccaggttggtcttggatttttgaccctcctgcacacacctctcctgagtgggatacagcctgtatctttggtaccctttggtttcgctttctgtagtgttggcaatcgaacccagggccttgggtttgcaaaacaatactctaccactgccccacccccagcccctgcttgctctgaaggggctgggaagggaggaagagccggtcaagaggaaatcaggctagtgttgggaggccatacaagtccctggggatccccgtgcaccaggcttggttctactcttcttcccacagatgaggaaactgtgggtcagaaactggtgtccagtctcacggccccatgccatgccatgcctccacctagcattccggggcctcgctttagattgtagcaaatccctggccctggaggaggcaggagctcacccttgatctcagaggctccagcggctttgattgtaatcaaattaatagataaacaagatttattagactcttaattagctttgcgacaccgatttgcatagagacaatgtgctaatcacaaatggctttttaaaccactcattaaaaacctgggatgaggaaacagacgttgttgggataaagtccagatcacctcagggacactgaaggtgtccttctgcccaggcaatggctagatcctccaggtaacacacagcttctgtcctggagttacggtgggggtggggggatataggatgtttctgtggcttctgctaagtggaagatgaccttggtatggtcaacggtgaagctaagacagaagctgaggacttttacaagctacagttagctcatactcgtcacagggtcacagctactcttatcaagtgctttgggagcagcctggatcttctctgcatttctctcatggtggtgggcagcaccatgtctttttggaacctcaggagctcagagaggtcaagggctctggttagaggcacagcacagcctaaggtgaaagaacttgggccccaacttgtggcctcacccaactgtggcaccaccacatctacatggcttgcagagggtatgatagtgctctgaaccacagaaagaccatggtccccaggggccctcagacctctgggttcaggtagggtttccagctccagttgaggacccagagtctctaaatgcctggctcctctagggaccaaactccagacttcccagtgtacagaatacaccccatccttagtaaaaagacaacagccccttttgaagatatcagagttagtttctcagttgcaaatacttgctttttgcttccactatctatgtttaggaatttacattaggggtttaacaggtgctggggacctccagagttcccctggaaatgagagatttctcccacagggacatgcacgaaggttacaaggagccgccaatcaagtcaattcctggtcactggttactgagtatcctctccaccatcctgggtttggagaagggtcaacaattgctccatcataatgtggcaggattatgataattacctagggtaagccatggatcagagcagggcatagactgtttcagaaccctcacaatcagcaaacagctataccctcacaacccttgcacacactcttctgtgtcctacttcaaccctataagctgtgtgttcttggacaacttactgtcccactctgggccaggttagtttcctcttaagttctgtgacctcgctatgctcacaagagggaccattgctcaattcaactgatcagcctcaaccccaatcaatacccagcgagtgcccagctcctcagcctgtctcggaaaggccatcagagaccacagaagacatggtccctaggtctgtaagcttgctgaacacctgctctgcattgtctgttatcctgctggatcttcaaggccctgaacctgccatggtagcagaagtagcaggaccttgggcggcttttacacacagtattttgaagcaaaactagattgaggttataggatgcaggtggcttctcttcagccttggatcctccatggtcaagacactttcagagccctccacaatcatctctgtctgctcctagacacaggacccgggcttccctctttaccctgcctttatccaccagctcctcattttgccccaggagccttcctcctctgttggcagagtcagcttctaagtaaagagactgcttttctttgtttaatgacagataatccgtatcagctcaacttgatgaagacctagcaaaggactggctgtggtcaaaacctgccagcctccagggctagaatagccacagccgagcaagtctgagacaagtctctagtgggaagtcacactattctggtctatcaccattaccaacagtgaaatgactcaggcaagaaagttgggaggggcaatgttaatggggtgatgagagtccgtcctgatggttctgaagctctgaggggctgggcagaattagcaagacacagctgaaaatgatggcaggaatatgatggcaggctcgcacgcacacacgcgcacacatgagtacatgctctcacacatgtacacacatactcacacacctgtaatcctagcactagaaggctgaggcaggaggatcagaagttggagatcagcctgtgccactgagagagactcggtctgcctccaaacaccaaggaaatggtcaaccaccatcagaccaattgccaaagtcctattcactgacagcttggccagggataaggaacagaaggcagaaggaagcaggtttacctctctagagcaatgaatggttttcaagtaaggcggcatccccactttcccaaatgtgccgggtgttcttactgctgcagtgcttagggagtggggaggcagtcttcagaaaggtaaggtaggcagggcccatgatgctcactgcattcagctacccaggtcaagtgccaccccctcaggaaacgctggcacaggagatagaggctgggttagcagagcctagtgaggcagtgtcagcgtgctgtataaggccttgctatgctctgaaatgcttttgaccatgccaggtaaacgtagttgggccaccctggccaggcagagcacttggctttgatgtgtgcttgaggtcctctctggtttcgatttagaggacaaggttgacaccaagttctggcagtgcccggcggtccagaactgactacaggatgttctgggcttcaggtctctcggccaggcagaataatgagagctgagccgactgcagaggccccagtcattagcgaggacccacaaggggagtgcagacagcatgacgggccctgttgttgcagggtcagcccacagaatactcagagcatcagctcagcaaggcgcctgcgagataattaacagggaattgccagtctcaccacgtgcttttctgaggctggtgcaggggagcctggccagttcctaggtgcttgccagtcttgcaagcctgttcctgcctaggatctagggttttggcagacccagctcagtttcacttgttccagtataatgggtgtggcctggttctgctctacagtgaggtgaggccatagccctggagtgtcctgagacccaactggctttcagtttccctgagagtgcttaaattcctgctttggttagagggaaggctccaaactcatgattcttaatgttctatagaggcatctgaaggacaaggtggggaaaaacgtcttctcatccctgactgacgggaagacgcaagccatttaggaggatttaaaggccaactgcttctcagaggccccgccctaggtattacaccacaggaggtccccacccccagaccccaggccagaaggcacctggatgctcacctgtgcgacagagtgggtttcatggagctcatggagctgagggggggctgcatgggcagtttcccaggggggtcgttctggcggctcttctgatgtcgcagcagcagcaggcggccaagttcttcacaccaggaggacagcagggctgcaagcaaagacagatggtcagtggacacactcgagccccctctgcatccttcccagacgtggcgtttatgaggccggttttgctcctgggaaatttctaaggcttcctggtaggcctcagtgttttaaactataaaatggaccaaaggcaaaatcagaatcatttgtgacacgagtccactacaagggccagctggaatggccaccaggttgagaggccccaaagaacagtcccgacaatgaagagaagacggagccaagggtgagatgaggggaaaaggccaacagaggccttggatcagggtatgagcaggcacttctagggaaccccattaccacatactcaggacatttagtgctcccatgggtgtgttagaaactgtaaagtgtagacataacttagagctttcttggagttgctgaagacccagaagcattcgctagactctgaaaccccccagccagaactctcctgttgagtacacatcaaccttagacagaccgaccgacagacagacagacagacatgcacgcactcactctcattggactcaaatgcttggaaggattgaaggtttccatagcagagggtggtagtgtgtgagtgtgaggtgtgagtgtgtgtgtgtttgcactagagacagccaaggcagcatgtgcaagagtctctgccaccagcccaagactacagtgaccaatgcagggggaaagaattgtcctctcttcatcccagtgtcaccactagggactaaaagtttccttaaggtcctttcaggatacagccaagtttaggaaagggacaaggttaaggctgggcttgtcaccacatcccctgtaagtctcagagtacttggagataaatcggggtgtggctccagccgcagatgatggccttgtaggacaatgagaggagaggccctaggtcctgtgaaggctctatgccccagtgtaggggaatgccaggacagggaagcaggagtgggggtgaggggtgggatggggggtaaaatgtctattaaaaaatattttttttcaccaaaaaaaaaaaaaagaaagaaagagagaaaaaaaaagaggggtatggatttttgtcactcagtgctcaaagccagagtgactttccagaggtcgagtcagcgtccctgctctggaaaatctgccttcagcagataagccgcagttgaccttcctctcttgactcctcccacttaaataaggaagctgaagtcagcactgctaacactgggggacatgcccgatgcaatctgaccaggagtgctgggtgcttcaagctgccaggccctgcacgggtcctctctcagcccacagctccgacggctatcactggggccgtgccaccaggtgcttgctcatcttgccagtgtccaaaagctcctgaccaaggatggaagtgggactgtagccctcaggagagcacccgtgtctcccctagaggctggtggatatgctgatgcagcttgtccttctctgtgggtgttctcagtgtcaccaacacagggaggaccctgcccctggcacgcatctgctgggaagccggtgaggctcctagtgggtgcccagtgttcaagcgtgccaggagggaaagccgcctatccagaaaggctggatcaggaacaggtatgttttcagattgctccattctttctctgggcctcggttcggcttcttgcacagaggagcaggcacctagaagctcatttgcacgccaagcacgaggcccacagggttgcagctctaggaggcttgctgccagcacaaaggatggatgccgaccggctgcttgtgacacgcctcactatcttagccctgccctctgggtaccagccaggctgctgtgggatttagggttttccttggttaccggaggctgccctacaggtaaagggcaaggttgttcactatcccaagtggactggtttctggaaagataatgaaggcataggactggcaatggaaatgggaaggaggtgtttgttaactatgtcttctcatgcctggaaggccacaatccagtgaccaggagggaaagaggggtgacacagagaaccctcctccccctaccttggctaaaagcctggggagcacagagcttgagagcagccccctcacaatgggcaggagcaatgtgcatgcctacgaaggcttgaacggacaggggctatgtggagacaaacaccacatggaaatttgcagccaaaaagggagtatgggtctgtttacagacaggccaggcaggagcccatggggctgcagtgctccagcctggtgggaccaagcacactttgatctgggaaggcctagctgcttcctgaaggtcagttttgcctgcttgtcctgtgtaccagtggcaggtaaggctgccccaggatgggcaacagagactgttctggtcctaatttacacccttctctgtggtagataggtctgaagtgctctatcaactgtctagacagccagcactgttgccactcgtcttatcctaagagtctcactcccaagttgactacagccaggagcagtgtccacagaagcccgtgatctaagacctggcactcagaggcatgaccacaatggcacccactgcttcctcttctcccgatggacccatggcagggttcgactgtcccgagagcagaacacatcaagccacaaactgtcttttgtctacagtgcctggagaacagtccttagaggccccttccttacgcccacctggagcagcaggccttacaccacccatgtccaagcactgaaacgggtagccctgggagtctggcctctcagcctggagggagccagtttcctcactagctcatcagaacattccaccaagtgtcccagctaatatcaccacgaaacagtgggacccacattggagcccaactgtctactccaagtctcaacccagatttcaaactgtttccaaacttctcaacatggtatacaaagatgcataacccaatacatctaaaatgatcatcaaatgagggctggcaagatggctcaagggttgacggcttgagttccacccttgagacccacatgttggaaggagaacagactccttcgtattgtctattgtcctcctcatgtcacacacacacacacacacacacacacacacacatggatatatatacaaatagatgttaataatttaaaaggagatccattgaccatctggggacaggtgtcactgtgtagcttggatgacccagcactcactatgttatgtagatcatgctggccttgaacttcaagttctgcctgcctctatttattgttgagattaaaggcatatgccatcaagtgtgtggctctccacaaaaatgaactagcattttgttactaggttcccttcctattcattctcaccttaggtgccaagcgtctgatcgcccacctatattaatttgacaaagagctgctgaacacttactgagtgtagagcttcctgcactagataggatgccctgtataagccagcaagcaaggaggcaactctgtgcactgtgcacactcctctggcagtattcaggggtcagctgtattcagggtaagggacaatcacagatccaaacagttccacctgacttccacgcaactgttagctaagcactcacgtgctctctctgaacctttatctgttgatgagtatgaccctgatgcctgctcttcaggatataaggtgcttaaaacagtagcttgtaggtagaggggtctatgtagcattgtggccccagaaacctatcactcaccatgtgagcagtgggagacaacaccctgagaaactagaccaccactaggtgacacctaaacaaggtcccagggcagctgtgagggtggtctgagtcagcactctgaagtacaggaagactgcggacccatggtacgctcatcagatgatgagcatcagcccccagagttgacagagctacaataaggaaggctctgaggccttgctgtgtctgtctacttctgatctctgagcagagtgcagagccaatgtcctgggtgggtatgggctccagacacacatgggagacctgtgggtagacggaggcctcggggcagatgatgacgccacctgctcactcagtacaggctctgcattccgccctgtccctcccttcttgcccgagctgccaaggggcagaggaaggacagccagtgtcctactgtgagacaggaagagaagggccatttcctatccaggtgaagctgtgcctcttcagcggttgccccagaaagacagtttgctctcctgtgtctctgaggacatagctaggatcctctgtaccagtggtactggggagagcagtaagcacggcatgcccatgactactgaaaactaaagcatacaggaaagacacacggactggtgactgactgggtcccaggaagtgggtctgaggggatatagaagagccaggttccccacatctacctcttcaagatctttctagcaactactctcacaaacaggtactatcacaatgtcctttagggcaaggaggggaacaacgggagaggccccgaagactggaatgcagagccctaggcaccgagctcgtgaccgaccctaggtgtgcctcccctaggggcagggacaggccctgaatctgcttctttttctgcacctcccagaggagatcagaggaggcagaagcagcaaggctctaatttggggaaccacctggacacctggcgttgttcggaacttcagagatcagcttttgggggccaatgaggataggatccagttggggtacaggggaacagaggctggatctcagcatctaagacagtgagtacacagggtcataggaaaggttgaacctcactagtctgggttgggcttgagcttgaaaaggagcaaataaaccagagggagccagatctctgggcagcttggcaaggtttagatacaggcccaggctgctcagtgctttaagatccaggaactgggaaggaccagatgcagggaggagcctgaggagcagtctggagagcagggaggtaagagacaaacagaggctttgtccaccctgctgccagcagggaatgcacagtgagacaaggagactctgaggagcacaaaacatttccatggctagaaggcaccaggggagaaggttgtgtgtgtggagggggcagtagagataggaggggtggcttctgagtccctcaggccaccaaggatggactctgaagtagccaggaagagaccgtcaagagacaagggattcctccttcacacatcctaggaaggaaagaatgcaaggaagggccattcctccaataaatagctcagtcacgcatttcaggtgcacaggggacgatgacacagcagcaggatgagttaggcacttcctggtgagtcagaaagctaccaacatggccactctagtcccccgagcacacctacctatctcaagaatatgtaccaacatggtgtgttgatcgtctcagcagcctgctctccttacaccttctctactacaagctctgcaatgcatcagagcaggcccacccatcatgtgcctgtctcccaacgtgtctgtcaccaacccaccctgctttggatagacaggataagctgaatggaagcaaatggggccaggagacaggctacccaggggttagacatgagactggagcggccccttgcatagtcctagcacttggcatagcatttagtaagaactacgcagccaacacatgactaacaggttgcagtgcggcacagacagaaatagctcggtacatgagagtatgggagacggtcagtcatcaagcactccatctgaaagccaggctgtagagctggtgcaaggcccctcccggactgcaagccagtctccatggcactgtcaccagataaaacctatcacagagtccactgacacatttcatgccatgcatagccacggacggctaatgagactttataaatataagcctcttacagaaacaacagcgtaggtgacttaaggacagctgccaccttcatgtcatctgtcctggcaccagtgctgatggtgtctgtacatccactatgtggtacccacagaggaaaggccacctcttatccctctaggtggggccagatcacactctcaccttctcctctttcatctcccaagcacaaagtcttggtcccaaaaccaggtggctgggagtctctagcctgggctggccactctagaacgtatcagggattcacaggcctcggctcaccccttcattctgcgtgtgaaatggtgagacagcaaaactcctcttgtttacagacaaggatctgaggattctcgaggcaatagaccaggcttaactgtggaagctcacaggagaagcatcaggcttcctccctcctgaggtcaacattaaacaaattcagattctggcaagtggagtatcctgcaggataaattcactggttttccctgttgccttcctctgaaggccttccaaggctgagacatctgacaaacagaaaacgaacctggtcccttgtgggtctgtctttcccacactctaggagaatcacataaacatacacagatgctcaaagctgtccacttggcacctttatgtttgatactccctggggtgggcagtgccatctctggcacccaacagtggccacatccagtgcttctctacaaggctgacctccgacccacgtttcaccttgatctctacctactcccgcctcatctcttgtgccagcctattgaggctcaccctctgtaggggcactgagcacagggcctgtccacacagaccatctctgaaaggctcttggcatttaccctattgtgccctgaagggcgtgggagggcaccaggagccaggcctcctgctctcatggcatggctcccttgtaagagtcagtaggttggacttgtgtcctgaggaactgaaatgtctgcagagctgtctcttggcttccttcctgctggcctctgtaggggggccccagcaatggaggaatggtcccactctctgccttgggaggaacccacaaaggaaccccgtgaccatgaaggagattctagtcttgggctggggcaggtagctctgagtcactgatccggtaaagcagccttaggctctgcaggcacatttgtctacaggaagggtggccattctgaccctactcaccctgctgcagtggatggggaagatctgccagccaccacgcttccttcccccaccccctccccagctacttcacactctcagtttgactcccatgccttgaggtctgcccaagagctatactgtattggaggaagggggcaaggggtgtgggtggattcagaagatcaggacaatgaccctgccactggtacctaggacttcccttttatgtccctcatctgggacatcaaacccatcactaggagacactgaagtaccatcctagtttctcatctgagctgagctcaatacctgtgtggccaagagtggcttttgtccctttctaagttcaggagggtgtgtgggtaggtgggaagaacttggcagccttagcaacagggggtcaggacttcttggtggtcacagggagctggactttggtggtgctgacaaaagcccctggttttctgtggaggaagtactcctgaggaattgccacactcttgccaggcctttctcagtaaggtgttggcctaagcttctggttttcccagatcactctcaccttctgttccctgctttgccagccccggcactgtgtggtgtgagaggcaagatggcagaagctgcctgctgacacactggctgggaacccttccatttatccctcattcttatagaagcttaggccccacaggccaggactggtcaggtctggtcccctaactgctcctcaggctgggacagtgtgtgcttaaagaatcctatggagtgacccagcctggagtagcttcaggctactcctcccacctccacccctgcctctagaacactccctcttcccaagggctctatgggtgacagaagctggagtctctaggtgtgtgaacacaccctgggaactgaactctgaggaaccttagagcctgcaaggctgattcccaaaccggtttggctgttccttgccttgtggaggctgtccggggctgagcaagaggagactcaagaagattcctgaagagttgagcctctgggggcctcagaagaacccagtctgaaaagttccctgcacatttcccattaccatcaggtcagcctatatagttcaggctcagatgctaagactgcagtgccaagtcaggggagaatgttcatcaggaagagaatgtcctacccttaggatggtttcatctctacaaagtgtcctctcaaagtactgtggacccgaggacgggcttgggaagtgagctggcaatctggctcagttcatctgacagagagccacttctggagatgtccctcttgaagtagtggctccctggtcctcccacagatcctcctgcgggtggacagctacagctgctatccaggagaagtcaggagcctgactcaggccactgctcagtgtgtggcaggtcgtgacctttgtcttcttaggctttagggatggccatttgctggctagggattgcagaccattacagtaggagacgaaagagctttatgaacaaagcatgggggaccagtgagaaggctcagtgggtgatcgtgcttggtgccaagctaaagtctactcaaccttgagttcaaatcccaggacccaaatggtgggaggagagaaatggttcccacaagctgtcctttgatctccacacacaaacatagaaacgtaaaaaataaaacacaaatgacaacaggcctttagtcccaactctcaggaggcagtggcagaagcaggccagtttctcttgagtttgaggccagcttggtccacacagaccttatctcaaaaacaaaacaataacagtacaataccaataatccaagtgctggggatggtagctcagtggcagaacttttgcctagcatgcatagggctctgggtttaatccccactactacaacgtacagccacagaaacaaagtatgcagcactgaggggaaggggaggggaggagggaggagggaggtaactatagtcttccatttagagccttggacctacgcccataacaaacttctctccacagcctgggaagacatggattccaccagggcagaactccttggtgctcaaggacacacactggtgttcctaaggggctatttgaggactccccacctgcccctgcaacttcttcttgccctaaggaacacctgaaaaggccaaggatagcccagaggtggcaacggtagtaaaagggatgtagttagatggcctaggagaccagaatgctctcgcattggcctgagtccctaaggtgagaagacacccccctcacagacacacacacacacacacacacacacacacacactttattgatcgtggagctgcagcagggacagcctcaagatccattttccttcctgaacacgctctctcctacaggctaaaacaccactaccctctgttcaaacttagggaattggggggccaaggaagtcctatggaaatcctttgtccctggggaacctctgagacatgtcatcgaaactcacggtctgattcctccaggtaagaggctggagtgagccccacttcttccttagatagcacagaatccccaattctcaccacatcggcagccagatgacagcagatcacacctttatgtgctgagcaacccagctgtacactgtgtccaatcctaggggaaccagcaagcagctggtgaccactctcaggcccctcaaatggcagagctcatgacaccaacatagaggctctgtggggtgactaagtcttggtgagatgattgccccacagcaaacttgtatcaacaaaggaacaatccaagcagttctcaaaactcaagggcgtggggcatggtgacaggtgtgacaaggatggagaggcagcattcaaagagtgacccacacccttcactacggggttcgagcacactcagggagcacctactggccagactctgtcctatctgccctctgtctttaggcctctgacccctcatctcacccccccccccccccccccgagtcaccagatgcctaactggatacattttcagactttcaggatcctggtgcaaaatgcagacagggcctcctccgtccaactccgggctatggagttagctgcagtcactctgggacacacagctcttcttctttagaagacctctcagtccaggggctccaaacatggcaaacaggggtggttagaggttccttcctgcccagtcttcaagtgggttctccacgtggttgtggctgtcttcctactcaacaaatgagagcacagtttcatttctacaccttccctgactggctattctgtgcctcttcagaaaaagcctaatggagatagtgggtgagggaccatctgcgtctggctgtgaccacctcctctccaggtgcccatcggggctggtaggttaacagtctgctgcaggaaaacagctgactgatctctttatgccactggatcgttttttttcctaaaccacagggggtccctttcataccctggagaaacattccagaacatgttctagattgtcatagacactcttggttttagactgataccacctgaagcaactctcagagactctggatggcacacctaaagggtggtgaaggcacagagatttctgttgttgttattgttttacttttttaacttgatataattccctatggacttctttaaaatatcctgtcatctcattgcagtgaaagtcattcttttgacaccagggctgtggctttctggatacccctggccagtatgtaacactcaggatgtcccggacaggaaatcccagagcaagactgaaccatctggatttcctggccagacattctcctagtgcaatccttagaatcgtctggaaggctggttacaagtcctagactcccgtaactgtgggatctctgatgctgcaggacagagctgacgaatctgcatttccatcaggttatggtgatggtgacgctgtccagtctcactctgagaagcactgtcgggcccggcagcacgaaatgctctcaaggacttcaggaatggatgtgagaggctctctctcctttctcctattcactgacttaatattcaggggctctcaggaccagctctgtaacccctctttgggttacctttccaccttgggctgcagagcttcttcaacctcacactctctctcagaagaagaatcctgggctggagacaggagtgggtggagccctggttttatgtcagtttttggagcaaggcccaggtgggctatgcacctgcctcacctgcaggtgaccttttctgtctacacaggtgttctagtggcatgacggaggagctacaggtggagaacttgattcgggtcagaccctattccagtgactctgcctctggagtcctctgattgaaggtcttgtatttgggaacctgggtctgtccccagcagctctcggggccagcagctctcggggccaccatcaacagctggtgggctggctgagtggagctgaggactctgcatcttgtggccatagggctgagccagctgtgggatctcaggagccgggccccaggtaaggcaggatgtgatgggggagggagggcaagcacaaggcagacagcagcctggccatctgctgtgcagtcagtcccagctcctggtttctcttcagagcctctggaggaggcgaccgtcatttgtttaggcctctgcagtgttcaatcaccacacagcactccacacaaccctccctccatccctccagctcctgttctctctctctgcaggaaacagcttttgccttctgcctctgatggaggccatgaaaattaacggagcttgaggcgaaagcacggtggcaggaggggctggggttggacggccagctggccaggctgagcgggcacagacagggtgagcttgaggcctgaggggctggcctggctagacaatgggcaacccagcaaggccacaggaccacggatggtggtcagcaggctggagccagacttcacagtttggactctgctgggatcctgggctgagggagaatctgaggatgaaacggcttctttctctgaccttaaaagagccagctcgtacaggcattgtgtcctcagaaggtcagctgcatatgctagacaaatcaggacacccctttttctttgccgtcctgacagtgctgggaatcggtgatcactatgtctagtctcctggcccccagagacactgagagacttgccaaaggacaaccagcaagagcaaatggcagggggttctatactctttgaaggagaaaaattacttatgtacaaagtacatagatatatctctttgtagagcagacattcacacgggcaggaagagggagctggctccagatccacagttctcccaatacctgatccacctccctcttgtccttctgaagaggccatgcatgcatacaattagagtagtggaaacaagagtctctctctctctctctctctctctctctctttctctctcacacacacatacacacacactccacattgtccagatgatgagataggaagactccatcatctaagggctacagaagactctcagggaaggttcctgcactaatgggaagctgaccagctgtcatacaacatggagaaaaactagcactgaaatgtcccattaggaaagtaaataggagctcagtgtgctggcacatacctttagcctcactaagcactggggaggcagaggcagggggatctctgggagttctaagacaacctggtctatgtggcaagttccaggacagctagcagtataaaaaaaagagaggaaagagggagggaggaagggagggaggaaatgtaaaggccagctggctgaaataaaggagagagcagaagagagaagcccaagatgaacagcttgactccccaagacggtccaatgactcagacttctcatgaggagactccatgtcagctccttctagcctcctcttcagcctccatgagaacccaggacagaaagagcccaggcctcacttccctgctccacacagatataaccaagcaagaagaaacaaactgaagagctcaggagtctggtggggcttcgggaagctcgactcgacagggcaacggcatttaacgaatctcatgtcatccatcatctgggtccagccacttagataccgggcatttgattaaactaatatgggcggcagggcgcttcctaccctcgcctacaaattagaccgtcacacacgatccgattaccttgactgccacatttatcttgagagaggggccatccatcactcctcagtggccgactctacccaccccatgctaattccatcaggaggagagtcaagtttgtcccagccttgcgtcaggtggcgtctactcattcattcatccgacattggttcaacacctacccacctcacagtacccaggaagaaaatgcaggctttgccttcagtgagcccacggaagtggcatggcaggagaaaggtctacactggtgaaggcagagtgcatctggcgtacctgcctgtgtcccagcctgcctccatctgagaccaccctgtcctcaagtgtcacacttgggaaatggttcaagagcatagcccagcactgccatggaatttccccaactggagaaatgttctagatagatctatgctgcccacaaccaagaggcaaggccacacgcggctgtggagtacttcacccatggccctgcaaggggagctgagcttaagtctcatttaagcttaattcactgaattcgagtgtcaatggccacctggggtccctgcctcctgttgcctagcatagatccagcagctgctgtggagagcaagctcggtcctcatcgtgcccagcgcagaacatgaccctagacaaatgctcacaaagcctggatccctgcactttaggatctcaggccagagatggctattcatcatttgaagagcttggaacaggcactcctactaatgggtcattataatccaacaaggtgggatactcctctacttaaatccaagctgtggttcagaggtaaagacggtacaagccacaccatggtaaaggtggaaccctggtttgggtctctgtggctttgagccctgtcttcccaccaattggactcctggcactttaggagaaagtcagcaggactagaggctacctgttctgtgcagagaggccacacagccagccttcccatgccacagcaaagctggtggtggctacctccctctaccctaggcctgctgtagccctggcagtttaggacagagctggagaagccaccataatgtttagttgtaccaggtacagatgggactccatcctgaggcttagcaagaattcatggaagatatgctgcctctggcttcccagataccagtgagcccagctctgctatctggtgggtaggtggggctcaacgtggctttggttaacggggaagtctgggcctgactctgaccctcaggctgcccctggagaaagccacactattccttcacaatactggagtcaaacggatataaaagagcaactgtttattcaccattgagaactgtctgaggtcattcacaggtcaagtaccaggcaaagatcactgtctgccctcaggcctggagagatggcaactagggacaagctatagaatgtctgtctgatgacctcaatccccacagatggacggtatggccttggccaacccacctcatctggcagcttttagaatcatacaccggggcacaagtaacaagtattcttgaaccctcctgtgagcatcggacaagatgtgcctgccaagcagtcactgccaaggtggattttgctccacctggcacaacctgagtctaccaatcacaggcagactgttcttgctaggaacttaaatgcagtctgataccagggagggagagaaagagagagagacagagacagagagagacagagacacacgggcacacatacagaactggagattaatagtgcacacacacacacacacacacacacacacacatacacacacagacttagacctaaaggcatccctgctgtcagagacttctcacaaaccacactagaaaggagcaggtttggactactgaggctgcctgcaagccagaatggctgccctagatggggtatgtatgggagaggcctgagagtccactactgggctagggaaagagaaggaaggatgtggtgaagcggcaggtcagaagagcctacacagagaagctgacctggtgagttacagttgaaaaggatgctgggaggaggggttacaggtgagtaggttcccagattgctccctcgcacaaggtccacctctttacactgtcccagtttcaaggactacttaggcactcacacattggtataaacaagtttacaacaagttgtgccgacacagtcaaggagcagcagttgaagaggagaaaacagtgtagaaaaaatgacgggtagctcttgcaacgcacccttaatttccaagaaggcaccggggagcaccccatcagagaccctctgctaccaagaccaccaggattctcacacccctccccaaaatgccaacactcctttgttgccacttaaaccaatttgggggtaattctgctggcaattgtcttccgatttataacacggctctgtgattgcatccaggctgatggttcaggccataattgtatggtaatcacttctgtttatgatcgatgcggaaatcactattgttttccagcaggcttgttaaatccaagaagtgcaggggtgggggagggagggtttatgtctgagcccgaggaagatgaaattaactggtgcagcccaatgtgggggaaggtggttcaaagacacccttgtctcagaagcacaggcacagtgggtagcaggaaggcagcagatgaacaagctgagagagacacaagatgcccctgctgaacagtctaagaactgtctggcactcagatccatagagatgtccagagggacgccacagtcatacagtaagaggggagggtgctctttagtacatccatcctcatgcctgcatttatgagctacagagaggcagaggaaatgcagatgccaggaagcaggtgggctactggctgccctatgcttggagcctcaggcctttcaatcctaggtctacatggtttcttcttgcccttgccctgagatcgcctacctgctgtctgaaacaaggtgacagatggcacctgggggtccaggtggcaggaacagggcagtgttgtgagatgagctgctgttttgggggaatgaggggaactgcccacctggtgggtagaaacctgaacctcccagaggccacagggaatggccctgggctggatgggggaggaacaataccttccaaggctgtggcagacaccttaaggcacagaaggatagaaccagccaggctggaggccaacagccattcggagcacgagcaggtaccagctgtcatgtacagctcaggcaaacctggatgttgcaggctgagcttggctgcaaggtagatggttgtataaatgtacattcttcctccaaagcaagagtggaagagaccatggaactctggactgaaggctgggatagggagacccactaggttccaaagcccccagggaaacactcactcctggactcttctctgaggaggcttttctcatccactgaaccccatggcaccaactgacaccattctgactgcccccagacttggttctatatatggccctagctcaggctagctttgggcaactgtcacaggcagcttccctttggctcagcaagtttttagttggaaagaagtgtgcttacggagctggagagatggctcagcagttaagagcactgactgttctcctaaaggtcctgagttcaaatcccagcaaccacatgatggctcacaaccatccgtagttgagatctgacaccctcttctggtgtgtctgaggacaactactgtgtacttatataaaacaaacaaacaaatacatcttttaaaaacaacacacacagacgtatgcttacactagctgccttaccaatgtcagcctgggctcaaggccacccacctcattctatggttttcttcacagactgagtgctaggtttctgtgtcccatgctgtcacaacaaaagtagccagggtcctgagatcatagaataatttgagtttgtgtatgcgcagtgttggggctcaaacttgagcatgctaggtatgaatgagcactctaccagtgagccacatcccagctcctatttacttctcttaaatttattgcaagcaactatttcagcccattcttgaatggagaggaccaccccagagcccaccagactcttggggttcagaccctaaatttgcccttgcttagttctccacagccaccctgtctatcctgtaccagaaggggtttggggtgtgtgtgtgtttcagagcacatcagggcagggcagagcatgccagaagccaccagaagtagaatgaacattcttcattgaactaagattccatggaacttctaagattcatctcaagaaaacaggccagttctcccagggatttggttttctgaagtatgtcaagcaagccatggttacttaaggttcaacacaaaaatcagtttaataacaagattttttagctacaatgaagttttctaaatgcagagacaaagatcaaggtgggaaacattgtatcttctgcttttgttttctttttctttggaggttggggggcatttgtaaaagtagtgtgtgctttgctctctctctctctctctctctctctctctctctctctctctctgtgtgtgtgtctgtctgttgtctgtccgtgtgtgaacaggccagggcatccacatgggccatattggatagagtgtcatgagtatcatcttttggggtcatggtgtcattctctccttaatacatgggctcctaaccaagtcccggactccaatagaaattctgttgtctggatttccaattctttgggacagtttcagggaataggagatatggcttgcaagggtctcctgatggtgtgagagactcagtatgagaagtgagaaagctagagagctttcactcttgctgacagcccaaactccctggctccacacgctccattagtccatgacaatacctccttttctggggagagagtgcggcatgggcaggaaagtcccttctggactctgaagagctctaacaacatctactgtgtcagcttatcatggaagctttggaggtagccggtaacctctgacctcaacctgcaatcaggagcttgagtcagttttaagataaggtcacacgggtgttgttcctccttgtgcctggtggtaagaggactcaaggtgagaagctgaattaccatagagagatccttctaccctagacgtaacccaggtggctgtgactggagggactgcactttgagggctcagagaccagtctttccagggtcctttagttctggcgccaagcagggagaggacctgacaagccctctctgttggatgcccagatgctctgctaagaaactgtgaaaaggacctctgcacagataactgtaatgacgtgcacagtatcttcctattcctggagatggcagaggtaactgggtgccaaggagaagccacaggattcccttccctcaggcctgagagaatcatatacaatcagattcccaaggatggagcaggctaggaagtcaccctggctttctgctcctgtcctgagagctacctctgggaacagtacccttagaaatactctactggaatggcaggcctgccttcctgtgggcatggctcagggtttgctagcacagggtagctcatcctagcccttacccgacggtatccactgacacacctacatgctgtatcctttgtgctaggcacactggtcacacacgagtgtgcacacacccacaagaacaccaccccagagcctcatctatgactcaatttggaaatgtcctttactggtctataaggacacacacatggccctatacacacacacaaacacaagtaatgcttgtgttatgcatgcagtctcggcaacaggtctaaccacttcgcctccagatacgagtgttaccctgcacatcatgtgctttgcagtcccactggggggactttaaactcccaagaaggcagaggccccacccagaacctgctctttgttcattcacgcattcaaaaacatacttgcttgcatttcacctacccggatgctgaacacacaaacctggatgagccacagctgccgagagtactgagcagtagcagcaggcagggtggggggaactaggtatgtgtcagagtaagcaccacagaaagggcatgccgcctgggcccccagcagaatgtccgagacacacccggggcaggcacagctgagaccgtggcacactactgatgtttacaagcttaaggtagtctgagtgggggacggcacagtttcagttaacaggacccaggactagggaagctggtctgaacgggcctttctaggggctgggtttcctttagggaagagtccatggggcacgcctaaaggtgggagatcccacaacctgggaagtaactccagagaaaacggtcccagagaaaacggtcccggggcgcccactggacaagagggatttgcctaagtcactgaggtcctttctggagagagcccagtactaaaagctgagaggattaccaggccctggtcagcctggccctggcgagacttgattctaggtcagatgggtggctggagggaaactggtagcggcatttcttttgtatcccaaacagtctgcttactgctcgctgggcctttgggtggcagcaggaccaggaaagagacagaccctgtgctgtgcccacaaaggaggaagcgggagggtccttctcacgtcctgaagatgtctgggcgcttcttctgcttccagttacctccctagtctccactgtgacctagtggagacccactggtcacagccatgtgtggcccagtgggtaggacagggattttatatgttgagtgctgacttctgccagggcatccctgggactgtctgggaacactgggggatggtggttggaaaaaaaacaaaagcatgcacacccaaactatccttaagtccctgtagagaaaccacaaacctttctcctgaggtttctcatggcatgaggcctggtggaccccaggacaagcaaggcacccaggtttctcaggttcaatggaggctgggaattagggtagcgctaagcaatggagcagtcgcagaggaggacaccagagagagggtttgtggctaggctgtgagtatagtgcctgggtaagaggcctctccctttgaggaacaagagggtggtacccctctagagggcaggtatatgcaagtacagagacttgttacagagctagaagagttaatggttcattagaactgaccaggttcccactgaaaaaaccaccctctttaggtgtactgaatagcaagaatcacctcagtgtagctcagctcaaagacgctctgcataagaagccaggggcttccagatgttgatgggccacacatagatcccagaagggaatgcttgtgtgaaaaatgtgagggccttaggaaccccatgaagactcccacccagctcaagcctcaggaaggaaatgaaagcggctgccagcacttgggtacttcctctccagctgggacatgagctggggcttcccagccctggtcagtcaccagtgtcagtcctgtggctttacaccaggacagcagacaacaagaacacccgccgctctccccacacggtttcagaccacccccttacctcccccgggtgtggtggccattcacaaggaagggatgggcatttctgtaggggcacagccaagattctgctagtagtacacaacaggaaactgaggcccagagaaggctatgggcaagtcgggtcaagagagaacccccacctcccgggcttggaactccaggagagtctgagttaagctgtcatttacagggtaactactatatcccagacacagagctaaatgctccgcagccctgtgatctactgcagcctgccaggcaagcagcacagatgttttatcgatcaagaaacaagcatgaattaagtgacttacccaaagtcacccaggaaactacagatgtgggtttcataattacgttccaacatggcttgggaataccctgggtgaccctgttttaagaggcctacatgcgtcggggtgatggtggtgatggcaacgggggccaggcaggcaggtgagtctgaggccctgctgcagatcctacccccactacagacctcataagacatcttcaagagacctcagtgacttagacaccacactgcccaacagaacctcctgtctttctgggcgttgttgctacaccattcaatatgatatccaccaagaacttcaaatggtgggattaaggaactgaaaaccccaaatcatctcattttaactaatacatctaaacagctacacacgctgggctgctcacacttgaagatagcctgagctacagagtaagactgtctcaaaacataatccccaaattaaaaaacaaaaacacaatcaaataggcacaggtagctagctactgataactaggtggagttgtgtaatagacctgtgaaaggtgggaccccaagaaagagaaggactccttaagctgtataccacaaaggcatcttgacaccccgagcttaggacaagaacctaggtaaatatgctctgtacagagtgattctaactgtttgtttgttttggacatggtctctgtaactgaggttagcattaaattcatggtaacccctctgcttctgcaggatttcaagcacttcctagatgaccactcctgtcatcaccagcctgtgtcctgggctgctcatgtaacacaaaaatgaggcacccagtattgacatccctcatacataacccgtctgcccttacattcaagcaaggtgacacctgtgggtatgtgatcacaggctagcatgtctaaccttttgacatcgtgacataacactgtcattacaaagcttacacttgaaaactatatagctgaatcacacacacacacacacacacacacacacacacacacacacactgcagaaatagctcttaatgttttaagtggctataattttgtgttgggctgtatttattctgctatcttcagcagcctgtgctacatgctgctgtctgctggggaccagaggtagcttcctgggtggtggcattgggctgggtctagatccagcagaactgagagatgagagagggttccaactccggtcttatctttttttttttagtatagaaggtgtgaagagttactctgtatctggtggacccagtcctttatttactgtgtcaattaccaataaacagaaggccaagtgccttctgcttagcttgagagcagaggccatagactcaacctccagcattgcaaagaatagaaaaagaaaggaagggaaggaggtagaatggagatggggagggagaaagagaaggaataaggaagggattaaaggaggaagggaaggagggaggagaaaagaagaaaagggggagggaagggggaagaacaggaggaagggaaggaaggaatagcaggcaggccctgggggctgctgcttcttttccctttgaatgatgctcccacccaccaccaccatttttcaaagtcctcctaaggataagtagagatggaaccagatgttgtagaatgttctctgtctatggctattccactaatcagagacaaactcttgggagacagacaaggtcctgtaaatcatgagatgcctcaggctctgaccctggggacaaggattaaatcctggggcaacaaataggatgtgagaagccctgggggggggggtgttctctttaacctgtccccatagccccagtcttaggaaaatgtccccattgcagtaaaacttcccagacctgcttgggacccaaggagctacagggccacaatgtctattttccctctcctccctctctccaggagagctgcctggggagatctggacaagttccagcaagttcccagagctctgggggatgtggagcactgcctttgacccctaccatgacaactgcaaaacaggagctctgtgaccagagagggctttcgttttgtcagcagaagcaagggtatccccgctgcaggatgctaacctcccctcttccacggcagaattacaacacctttgcttctggtaactgtagttctaggagcctcagtggctccaaagtcttcaacagctctcccactgccctagggaatcaaacctgggagggagggagggtttcagccatggggcacttagccgccactggaggttctggtccgctgacctcccatccagtaccacacctcaagcctcactcactcacatgacatttattatcccgctcactcatttctgggaaacttcaggctgatccaggcccaaagtcaccatttcctgctcccttccccagctccaccgtacagacgagatagagcagccctatcagagccctcagccccaccctcacccccaccccaaggtgacttgtcaaaggttacatgtacatgttgcatgcagtacagatactattactggagggctgggccagaggaattgtgtttattctgaacagtgtcagagtttgtggggagcgcatcccagctgaaatcaatcagaggggcctcgctgcagtaaaatgtcatcagaggctggaccagcccctcaggcaggccgttgccctaggctaggcctcacctggaggcagggctgcagaagaagccacacgattatgcaggtctaagagatgagaagcccagagtgggcttctagtggaagtcagggacacagctaggctggctacggtgagaggaaaataacctggaccccctgccccaggattctcatcgcgtggacaggcaaggcttggctcccggcatcctctgggaggggtccattggcagagagactctgaaggaaaggcagcacggtaccctgtaagggtcttgttaacagggctgtaaactgagattgcaaacaaagcccctctcggccttcaatatcccccctccgccccccctagatgggtctggaggactccctttcgggtatgcagaaagccacccctttagatagcccagggtctagccaggaagagactacacagggacagaaatgcaggtcactagtgctgcctggcttgagtagaggatcagggaagaaggcggcagggctcagttcaattgttagcttccagctctcagtgaggggcctgtagaagaccaggtgagggaagagacttgctccatcccacacctgccctgctgtgaccttggtctctcctccccaggtaatggctgttgtctgtctgtccttccaggcctagacgtactgctcaggagctccctaggaagctggatgtgctctgagggtgagggccttgtttttccccgagcgagctcccttgggaggtggctgctgtttgaaggcccgggagaggttcccaggcagttggggcttctggggagcgagtgccagagcaagcatagcccagtgggtatgcttcgataccagggatagtgggccctggaggaggacagcaagggggtgtggggcatggggctgtaccatttgccaggtatccagacctccctttacccctggggctctctctgctggtcctttccttctttctctggagtgaagcaagcaaccaggctacctgcccagggatgagtctctttccttgtggagaagttggcttctcctgagggacccaagccacatccagcaaggtaaacaccttccagctccagagtacctttccctccccttcagccctgccagttcagaactgcctgttctgaggaccgtctgatcgatacatgacttcacagagcctgacgccttgccggcaccatggcggtcctcagggaggtcgcccctggactgctgcccatacatgccccctggctgacctctgtggcacagcagagtgctggcaactagccctccggcaaaatttaaccccagtattaactgcaaacactggctagtctatgcctgccccacacagaggctgccatgactcaaaactgttaagcatacggaaaacctaatctaacaggcttatgctgacatgaggtgggctcacctcgagctttcacccagcactgtctactggaactttctgccactagaagacagctgttttatagtccaagctgtccagtagggtagccgctagcctgtgcagctattgagcataagaaaccaattccagctagggatgtagcttggttgatacactgcttatcttatgtgcaaacagcactggcttaagtaccggtcacaaatcaaactgggctcggtgacacatgcctaccatcccaacacctgggaggaaaactaaaagaactaagcgagtattacttttattgttaaatcagtttaaacttagacgcagccctatgtggttagaagccaccatattggatggtagttttccactgagatcaccagccatccctcaatgggggtgacctagcaagggccactcagaaagaccaacgcaggacgctggttaactacaccaggaactcagtttagacctcctaggatctgcatatggttgggtggtgagtaggagctcaatccctgtggacagagatctagaagtgctttttaatcctgccgtaaggttcttctacaccttcacacacttgctgaacagtcactgagcatccactcattgacaagctttgtggtgggcagtggggtgcatggtagtaaggaacacattgctttcctccgttccctactgggctgagctggactaatccccccccccccaaaaaaaaaaacacaccgggagccttctttctggagtgtgtggggctgtgaggggaagtgttcacggtggagggaagctgtgcaggggagagtaagagcaagcagcctgaggaagcaagtctcaaactctgtgcaggcggttgtttccggtacagactcagattctcaccaaagcttcgccgtttggtggtttctcactaaggaagtttggggtaaaaatagccctgaagggacttgattccagctacttacagggtagtcactgcctggttaagatatatatatatatatatatatatatatatatatatatatatccttggtctgatttctagcccacacgtaaggatggactgttgagaaacactggtaccaatactttggcagctgcttcacaaaacctccctcttagaaaatcacctgctatgcccaggctcactggtagttaagcctaatggtcaagtgcacgctatgcctcggccacactgtaagacctgatgctctcccaaagcccgtctaaggaaccctatctgccctcctagtcttactgcagctggcttccaggtgaaccaagaactgggacttatctatgcactggttaccaacactaaagccaaatgctggggacctctggcagctgcttcttgcttagcccttgcagtgttctgagaacctctctacaaggtcttcctcacagccggatacagcctgatgccagtcaccccccaccatcaccagcagcagcaggagcaacagcagcaggagcggcagcagccgcctttccagtaaacacttgtcagaactctgctgtgcacccatcacctctgggaagggagccctagagccatacaagcctccaggtctctccagcatcaaggattcattctcacaaaggagtagctttaagttaaaccccttagccactgcctctaaccaaaagggtctgggctagctctgattttttgcaaagggaagcctaccagggatgaagccttgtaaaatgtctgctggggaaccagcacttcacctttaggaaagaggcgtggggatcaatctgtctggtcccccacccaccctcgcatccagaggaggaaccaaggtctcctctgtgggtgaacaaaatgggcctggtgtacacgctgaagccactcttacggccaagcctcaggctgacaccatgcagcacacggtgctacccacaatgcactggctctcctctgtcacacacatgcacacacactcacccccctccccgccccacgagcctggcgcccgcacccccgccccgcagcccgcactcactcgcgtgcgcagcccgccggcccagccacttcactgcgagggactggtgactagggatctgaggcagctcacatttcaaacttgctcgcaggggtggtgctggtgcacgccgccgccagagcgaacgcacgacccgacgagtggagctccagcctccgggcgggggcggcgaccaggcccctctccctccccccgcctcggcaattaattggaagcaacacttgtgagagtgggctcctggagcgctgtcgcccgagggggcctcagggaaggcgctggcggcggttgactccgggtgcctcccgcccccgccagcgaatcttcccaagaggtcatgctaatgagggtccgcagcggggccggggtggcctccgcaggctaaggggcggggcaggctggggacatccagtggcaacttgggtttaaagggctttctgaaagggttagtggggacggagatcagcagcttggcatcttactcccccagcttagggggtccctgtagcccctgggattctcggaacgcccgggccagggtaggtgaactggcgcacgtacactctgcctccctgacttcggggagttcctgtgccccgcagccggcggcgggagggaagccggaggcggctgctgtgcacagccccgcccctgctcccggtgctgccgtcttcctgacactgcatcctgtggtggccgcggcctcttccttccagccagtagttgcaggggcgcgacccgtgcttgcccctcccactcctctgccccataggcacccctggaaacccattagctgtccagcccaaagaggtcggatcccctccctcctttgagggttctatccacctagatcactcactagggagaaactattttataaactccccccaaaacccgcccactcaccagtgaaagttgtttgaatgagctcctaactgcctcaattagtcgaggaggaaaggctggtcactcaccctcaagaaagacagccaagagcggctttaaattctctgcatctgcacactgatctctccagcttggggacttgaccccctttgccttggaggctccttcttgtgagcctccttcacacgcccctccagtatgagctccttcctgactggcccctcagcgtttctgcttgcctcgctgcgggccacagaagtggcaagacaaatcacttatctagacactgggctcttactccttgtttgacagaagtcgttagcaggctctaatcccacccactgccacttgaaatatcacttttgggatggcatttggaaatgcagttgtcatgggctttcccctcccaggagctggctaaatggattaatttctacttcataactggatttttctttttgcccaagaaccagcttctgcaaaggaaattaattggcctctccttcctggagcaacctccaggcagtgctgagggacagactgactgcattctgctgtgcacacgtttcaggtggggttcactctcatctcctgtagcataatggcttctttgaggacattcatttacccactggaatatttactgagaccctgcccctccaaacatccaccacagagttttgagactccaagaaactagatgaaggctctcccatccttcccactgctcagcatagccagctgacagagcaggacactttggcccacatttcagaagcacacacgtccctaagacctactttctggtgtcaggctaacttaacaatatcagggctcagtttcgattaatccaagcacgaaagcctctaaataactagaacccacaccccatcctcccaaagttctgtacaatgacagtttacaattctcatctgattcatagggcctgttcagtggccaagggcttacacacacagtagcagaaagaactaactttacaaagatagtcctggggcaggagagatggctcagtggttaaaagaggtttcttgctcttgcagagggccagaattctctccttggcacccatgtggcagctcacaatcatctgaaactccaggtttagggaaattcaacaccctcttctagtccgagggcaccagacacacaagtggaacacggacatataagcaagcaaacatattcatacatgatatatacatatataaataaaatatacatatattttgaaatacatatattaagaaagatcattcctgcaggttgagtgaacattcaggctggaactgagcaaagtttacaccttaggggcagggacttggtggtggtaatcctttagaaattataaagacagcttcccgttgttttgcctcctcgtcctcctacctcttagttctcctcgggacccacttcagaagctcctgagtgggaccctgaggatggaaataatattcaagatacagggttttccaaggtaacccaaaaagtaaatactcttcactagcatatttacatacttaagaaaacaaattgttttcaagcacccattcatcagtccaaactggcccctttcacttgctaatttctaggctctcttctctggaatcaaatccctcaaggccctcttggttagcagcctctttttagtattggagtctacagaaatgccggcactccacacactatcttcgttagaagggctttccctgactcgctccaagttccacatctctaacttccaaagacttgctcaaaagcccggggcccacaggccaaaccccaccccaccccaccccaccccgcagtgcttgccttgataaggatctacaaaaagaggcagcagacaaaggcatcctgcgactccacttccagacgctctgcagctcttggagtgacctcggcaagccccctcacccgcctccctcggacccccccccggggggggggaatgacttggggggtagaagaaaggaagaagaaagaaagggcgagctgtagccccatgctgtggctccttgatgaatgtctgccaggctccggagacctgactaaggatcaatagcgggtggcttttctcgcgggggtctgaactcctgtcgtgggcctgagtgaagaggagccgccaataaatacagtgctgtggcatggctggctggctccggagtcggggatgctttatcctctggcagtggggagcccgccccctgaaggaccctctagaggaggggtgagaagggagataatgtagccaggacaccacagtcccaagcttgggtcaaaggactgacttccttcagctcatggatgagctagaatcagttccaataagacaagggaccaaggcatctacctgggatgcatgtaccaggggtcaaaagtgggtcacttcccacttacagctttttctttttcttttttcttttggtagtgatatggtaagtctaggggcttcgaaggccatcaggaagttaggaagaaaggaaggaaggctaactaagtgggcaggcaggcctgtcatgcacaagccaaactctcaagatgaggagagggagaacaaccagccttgatgtggctcagattctgggcattgggttctgagtcccagagaagtcccagacttctaacccaggcagtttgctgactcagagggattgacaagaattctgatgacctggagagatgtcacttctgtgtactcaggcactaactgggaaggtagggttaacagggagatggcaagtgggtgtgtacctggtcgttgggaagcgtggagaagaacaaggggggacagaaaggaatgctgctccggagcaccataaagagactgggtcacagggcaccagacatacagacagctaaggatcaaatgacaacactgagtgtgagtcacctccaggagtgggctctgcctctgggaaccaccaatcctggggcttctgtctccttctgcatggtcaggacacaaaggacatccttgtagcactgtttcccctgccattctcctttctcagccctgatgagtctctcttactcttgaagagggaaggcacaggcaatgtttggctcgtgaccagtacggagcctaaaaggtcgcctataccagggacacagtgcagggccaccaggctgggctccccttctattcctactgacacctggccattgaatgcttgctggctgctgtatgggtttcatcatgtcctgagcactaacttatagtatccttaccaccctcttgtgtcaggagttattatgtgccacatggaaggtaaaatggggatagactgaccaggtgaagtttgctaagtatctaagctacttctcagccttgatacatcctcagcatgctgcacattatactgtctggcacgggatgcctagactcagcactgatggtgcccacctgggccacacagccagcacagtgtgcagaactcttatatagctcctagagtatctctttttaaactccaacttgctatttggcctatttgctgttgacagaggcagctcgacctgagatgacacaggaaggagacctcattacctccctcctcccattatagtatcccctgccccttccgggaatcacccccccccgccccacccccagcacggctcctcatcccagacccaggcagccttctcagaaccctgcatttggctcctgcccaaatcctataatcatttcattttgaaaacaacaccagccccctgtccctcacctccactcagcatgtccgagaaaccctacaatttccaggttattggagatccaggaaagctttctgcagggcaggcagtgggggaagggggagtgaggtgggcatttaggagctggctcagaatggccctgttagtcttagggaattgcttgccccctacctgctcagctggcaaggggtccaggctaaggctctatacttgtgaggaccccctcagtagcactgatgctgatggagagcctggcctgcaagggcaggagctgcccccagggctggaggagaagcaagaatcgagttgctgtgttcctggactccctgaggcactcaggaggcagaggtttaagagccaaacactagacatgctagctgggttttcagaatctactggacttcaaatgagtgagaacacccaacagcaggtcctatagtgaaaaacccaactaagacagttgagataggttgagaagtcatggtattggggtaaattgtatgcttccccaattgttgaagtccctaggacctgtgaaggaaaccctatttagaaacagcattgctgaagatcaagttaagatgaggtcatgagtgtgggccctggtccagcatggctggtgtccttgagagcatttgggacatttggatacaacaagcagacggtaccctcttcaaggaggagtgagaaggacagtggagactccagagcctgcagtggttttgtagcaccagctaagacacttctagcagcttggaggagccctccttccctggtacctacataggagcttgacaggacccacactttggttttgggtcttttgggcccccaaactatgagatagttaatgcacaccattatggtacatgtgttgggccctttattagtggttgcccagaaaactaccatgaggtgatccctttgaaatctaagtcacagcccatcatgattccagaggttcttgctgactcggtcctgattatggcttatgatgtgggtctcagcttctgtggccagtcactgctctaaatccatttccttagtgcctctgttgaccctgctgcagcctgactccagagttagccatcctgacttggctccctcttgcagggtctcccttcgctgaaagtccttcctcagccacactgttccaagctataatccttcccacctcaccccgtgcttcttctctatcttagctttgccacactgatgtttcaagtatttattttgtttacttctgcctctctggctaaaaggcgggatctttgtcaactggaatccttgtctgatacacgctgtttgaacagcatctatgtgtccttacaagataataaatactctttgtataaaggagacaaatagctacctgaattaatgaaggagcgaagaaatgagtgagtgtacactggctaatcacaggctccagagatctgcatgtcctggctacctgtgcctgcctatccagggactaggttgccagcctgctgtctggcagaacacaagctatttcccaggaagtctatttgaacaggaagctcagactggccaacaaaggggccgggaagtagtgggtacaagccacatgagtcaggcctctaatgaatctttccccattgctagagttgcttttgaagggaggggtacagaggcagctgagacattcaaagcacagcagtcctgggagaggggctggggggagggtattgcttctcccaggacacaggcctgatgaaggtttccagatggcttcaggcctagacccacataagttccttgaatttggaaatgcaatttcctttcttgccagagcagtctgtctgtctgtctgttgtctgtctgcttgtgttactgtacacttcccagtctgttcgaggcagcctggggaatagcacctactttgcacaggacaaaagtgaggttcagatagggaaaggactggatgtgacaatgcacaccagccaggtgggggaccaggcagggctgcaacccaggccccctagcagctcatctttttttttttctttctttcttttttttttggtttttcaagacagggtttctctgtgtagagaggctgtcctgaatactcactttgtagaccaggctggccttgaactcagaaatccgcctgcctctgtctcctgagagctgggattaaaggcgtgcgccaccacacagacaactcggcaggcccgtgagctttgccaggaaactgctacctggtgccatcttcccctcttctccctgtctggggtgagaaggagctctccgggcgggctgcctgcttcttatcggtgccatttcccacagcggcttcttcctctccccagtgtggtcccagatgtcccccacctccaagggttctggacgtgagcagacaggccatgcaggaatgtctgtctgggcaaaatctgaaggtggccgccagggcggggcgccgggtaggaggctcgatgttgaaatcaggctccttggagctgagctcagctgagcagcagatgtctgacagggagaaagctctgtgggcctgctgggggaccaagggcaggtcgccgtccttttctgggccctggtttccttccatcaccagggaagtcagctagtgtggattctgtacctttctttgtgatgaagggcactggcttccttaagtctagctgggtaaggtcaccattggggtgaccttgctcatgccctgggaaggtggcatggggccaggcaagagactcccaatacacatcgtgctgtcaagaccaagaagctgcctctaaaggagccaacatgccacacttctttgcctttccctttcccggagcttattaatgaggttctaattctcttagaccaggtactccataaaggcagcaaagcagctctatctattttgttcacttctgcatccttgatgattttgtgcctggaccaagacaggtaccggacaaatgattatcgaaagactaatggagagctaccaacttattagtttactggtaggatgtcagctctaccctttactgtctatattctacgactaatgtccaataaacgacacgtattatttttaggattaaaaatgcataaccaactttcattttaaacttagtagaatctaaagtaaagactcccctccccccaccttttctgaaaagtgctatataccgtattcataaccagggtatcaagcatgaaacaatttcttagcaccaaccgactttcagaagcctggcgtattggcggctcagggtgaggtacggccagttgaaatgctgaagagctaccctctctctctcccagcatgtttggcttccaccccagtacagtcttgttcccgtctctaaactgtattctctgcctctggccctagcttgctctccctggcaaaggcttctaaaaggcaaagctgaccatgtcacttgtgtgaacatcaaccttgctttctacagtagccaggaccaagttccaaggtctagcatcttagactgccattcatggcctcaagtgatgctgtccttggcttggatggcttttgtctggtgcatgctgtggtgcctgtgtgtacggacctgagtttgccttctttattaatgttactgctctccctacgtgtctgttaacatgctgggctgcagccagctgccaacatggagttgggaagaaacctgttggccatgcaggagtggcagggccgtggaggctctcagtcttctgtccaccaagctctgggatgttccaggagtcgaggaagaataagtctctgccagtatctcaggctgtcaaagaggcctcatttctggtccaccatggcatgaggatgctattgtttgggtgctgtgtccctctagaaatctgctacctattaagagactatgaagaggtggggcctgtgggaggtgagaaggtggtgaggctataccctcgggaaggagatgatttccttgatgaagtggcttgaagaagccctgtcactcctcctgtcaggaaaaggatgcaggaagaaggtgccagcagatatcaaggacccccccaccaggcccatatctgctagcattttgatcttgtccttgccagcctctgtgctgtgagctgtagatttctgttgtctataatgcgctcagatcgatgtgttttgtggtagcatgttgcgcatcacctgctctctgcttcggtttactcagtgcacgcgcagtgtggcagccctgggttccaagccactgctgctcaatgctctggagcacagagagcccacacccaccttgggttccagacagacctgggagcatggtatgtaattgaatttggcctaattaactcattgagctgaggaacaactattactgacagagccctgggtgtcagcggaggctggaaatcaggagccaagagagctcccacatcctcagaacccgtaactcctcagatgctaggagccccagaggtaggtagcactgatcctgtcacacaaaagaagcagctcgaggctctgagtgacttagtagagattgaagccctcattctctgtggccagggcctctcgaccatgcactctcctctgcctgggatgtcattctcacacacttctcagagcagctatgcttatgggggcatccaaacaagggttactttctcagccgagccttcctaggttctcagccatgagctagctgccttcactgtcctttgcagaggcctcatgctgtagggggaggagtgctcagctcacagtgttcactgtccagcacaggctcaggcacacaggcctggaaggttgggggaggccctgcttcaaggcctagagctgggggcttcagatgagtcctcaacttgaggtgaggaaaacaaggctcagggtcctacatttgcaaaaaaaaaaaaaaaaaaaaagctagaactttatgggtctgggcctgcctcagcctccgtgccctctccctaggtcaagggaaagatcaggctgacttaagcaaagacaagcctctgcgtcccaaggtatatggtatatggtatatggtatatggtatatggtatatagtatatgggagttcagttcagtcaatctgagttggtggcccacttccataggtcaggaagcagcgctcctgcccacttcaacctcctggctgtccccagtcttctaggcatccctcttcctctttcagggacacagcctgagctgggactcaagtgtgcctaggtgtgagttctagtcccaccatttgctacttgagggatgtccagcatgtcactcacctccctgagtcccagctgaagatttctgcaaggagtgagagggagaacgagtgtgtcatgcttgcccagagtccacagcatgctgaagactcaaagcatctgctccccagcgcttagtcagtgcacgggccgagcagtgcctgtctaaagtgctgggtaccagaagtatctcaaatttctaggttcaggagatagtaaaatatgtgcatatacatatcctgggaaggaaacccgagtctaacagtaaattaatttcccaatcacaggcaccttatgtgcaaggagtctgaaggaaaaatttaacaacacagtgtacttactgttaaaactgtatgcaacaggggcttatagagatcaggctaacctcagggtggctgagggtgacactgttttcccacctctactgtctgagtgctaggatggcaggtgtgtgccgccaagtttggttttatgaaatgctgtggttcaaagccaggcaagcgttctaccaaccaaaccacaccctggtcctgcattgggtcttgactgtgacctgtcttacggagctgggagtggaatttttcatccttgagtactcaactgccaggcacggtggggaagacctgtaatcccagcccctgggaagggggtattaggaggaccaggaggggtttgagggcagcctggattgtatgaaatcttggcttaagaaactttgaaagcagacaaaacaattcccctaaaagacttgtgattgttaccaggggcaggaagagcaatggtgacacacattgtatggtgtcagtctggaccttcaagggtcaaggatgctgagtagaccatgttccagtctgtgctggtctcttctcagatctgacaggagatgggccagtgaccctcacaaactctgaactctaacactcacatcagagagcaggaacaaaagcaggaagcccaaggccatcacatacactctgtgtcatctccagcaagacactgctcttctgctcaacctacctgtcacccagggcctcctctttcataaggggttctttctagtgggtggaggacagtatcctgtacctactctgtcttggcaaaggaagcacagagtactcatataacccccgggagaagggggtcatagctatattatattacatgttaaattatattatacattatattagaggaaatgcagagtggtaacggtagtcttcctaagattcacagcagcaaaggctggggctgtgtgccctggtacaatgtgtgtttagtatgtttgaggctctaggtttgaacttcagcaccaataagtagataaataaagcctcagctcaaaagcctagaacagcagccactgctatgaggtctccccccaaatggatcatccttgtcccatccttgttactcaaatttaagtccaatggctgcacactgctcacagagaatcaacctccaactacactggaagggtcaggacacggcctcagataagatggctggcaacaagagaaatgtacactttcttgtagaatctgaagtcctggtccccaatccccagcacactctggaaccttgatttgagaccccatctttgggtaacctgcttagcttatgagaccccatctttaggtaatctgcttagcttagtaacaggagtcccacatagagctaaggagtgcttccctttcaagggacgagtctggcaccaaaagcttaaaactaactgtggtccattttgggctccaaatatcctggggctcagctccttcttccatattcaaagggacagactctcatctcttctttttctccatttagcataggagaggcagacacatggtctagcctcagaaggggaatactggaatctctctccaggaatcacaaagttgcctctgttcacataaggggactcagggatgcctgggcatcctcactccctggcctctgggagggagtgattccaaacatctggggcacgtctgagaggcgatgaggaccataaaaaaaccttgaggaaacaggactgtatggtagctatgctatgtctatggttgagggcattcaggaatgggcagagctaaacagcagtgggcttcccagggataggtttagtcagagaacaagatgtgatggggacttcaagttggggtacagctgagccagcagggccagggtggcagagagctgagatccctgggggtacagagaaagacaaagaagatgggcagattaggatgggggaggggcagaggtggaaaaggaaatagagactaaaagagggcggggaatggagggagggagagagaggagggctctcaggaaggaagcctcaggccccaggaaatggagcctcccctggcaactccaaccggagagtagcataccctggaggatgtggtcacctagttttgtcttgacctagcctgtctccagccatgtgaccctgagccttggactttactcctgtgagcttcagtttcctcaaccagagaaggaaagcactccattgcgagctgctagattgaaaaggcagagagggctgtgctttccccacctccacaagcgtctcatgccctgccctttggttccaacctagtctaggttagctgcttctcgctggatggctggcaggagcttcgccatgccccctaactctatcctcccagaatgtggctctcctgacactgtattccccctaagcacgtccctccctcaccccagtgtgtgtgctctttgaaggtacagacaatctgggggcacacaggtgcttacggtgcaggggtgaattcagcttcttttccgcagcaagtttctgctgactataattatgaggcagtttgaaaggcaggctcctagtaattcctgtttcctgccagagacaatagtgtctcttcattccaaacaggtgagactgggtcctctggaattccctgcaaggagtccagcccctgggcagtgttccccagctggccagcctcaacaagccaccatgtccctgggaaggtaatgaggcatctgtgaatgacaaaccatcggccagagagctctgttgttgcagcaaaggcaactgccatagccaagatggccccgctcccttccagccacctgcctggccgccacccggtccccagagaggaaattatcactatgcagagcttccacagcaaaacacaaacacctggttgcctgggcagcaccttgccagggtgacaagatccagatggtcccttgagagatagtagggttgccacggaaacagaatcgctgccgctctagccgagagatctggattctagatgtactggaccccaagctgagagaattgaggtgattttcataaagctacatcagtaggtttccagcttgaaccacaaagcaaagtcctagccagtgttgtaagttataacttataagtttataagtgatcggtactctggtgtccagtgttttgggagatgcccccttccgtggcataattcgtacctaaagtctggggcttcaggataaggccggggtcaggaagatggtggggctaggctgctgcatcagcttgaccctgtagcccgagctggacccctgcccttggttttcttcactttgttttctcattctgagctttaagtggcctatgaacaagcctagctcagaagccactgggacctgatgaagatcaccggaaagtggcaaaagagggcctatggtcctgggccagcatctagtgtctaggacttagtttctgagcatcactgtgcacatacagagctgggcagctcagagaaggcagaggtgccacgggggcacttcctcctagacacagtgactgatcccagggagggagaaagaagaggtggagccaggggagaggagagagagtgctgtgcctggagtcagctggctaaagctataccctcttctgcactggcttcttcctcctgttcttcagttgtaagggactacctgtgctgagtgccacccccatcccctccatcatcccttgccttgttatccgttcgtccacttgccgagtccctgcaatgggttgggtgggattgtgatgatcagccccaagattaataaaagcaacctgcacagcaccagacaagagctccatgaatgtcactgcctccttgcttccaatcctaagttctgaggatgttgtgggacacctgtggacacagctctgcctcccacaccaggctcagcctcctggtcatgaagagaggagatacacactgaacttcatggaaatccgtagcccaggcctctctggacttggtgtcatagggagtgcccactcttatgcctggtatttagtccccctgacctccagatgggtgaagctagcattaacttgcaaccgatgcaaacaggtcctttgctcttcagcccccagctttgtgttccccctaaggatgctaggtaccccaggagactggatttcagcatgctgggtaaatttgctaacacatagccatcaccaaacaataaggctttgttctaagcatcctgtgcagactgatcagctcaaaacctatgacctcaaatacacacaaaggttggtgacttttccaaggttacacagttagtaagtagggggctgcgtggcattcagagccaggcggactgcttctgagcctgcacgtttaactgtttctcttctctctgcactagtttagtaattgttagagttcttgacgtcaattagggccagcccagactctctgtgcctcaccctttgagtatcaaaggaccccaaagatgggaaggtgtctaacttacagcagagacaaagtgcaggccacatggatagcttgagtcattagcattttttattgtttattatttgtttgtgtagcccaggttggccttgaacttattatcctccagctggcccatattccttgttctttacatttatggtatttctttgtgtctatgtgagggtgtgtacacacatacatgtgggggtcagaggacgacatgcagcagttggttttctccatgtaccatgtcggctccagggatggaactcaggttgctaggcttagtgacaggtacctttatccactcagtcatcatgccttataaccactgtccgctccctcgcctccagacctgagtgtgtgtgtgtctgtctgtctgtctgtctgtctgtctctaggatctcactatgtagccctgctgacctgaaactctcttcacagatcaagctggtctcaaactcagagatttgcttctgcctcctgagagcagggttatagatttattttgtttttggttcttctcaacagggtgtcactatatagatctggctgtcctggaactcactgtgtagaccaggctggtctcatggatctgcctgcctctgcctcctgagtgctgggattaaccatgtctgccaccattttttttttaaatctctctgtctctgtctctctttctttctgtataatatgtgtggttatatgtgtgtaaccataacatgcatgttatagcacacacatggaggtcagagaacattcttaaatggtgctctttgcctttcacctcatttgagaaactgcaatatcacaagcttccaggttactcttgtcttgatctcccatcttgtaccaggaacacttggattacagacaagtgttgctctgctcatctgtatgtggctgctgggaattagaattcaggttttcattttctcttagcaagtgatacttcaggagccatctcctaaacctccctcccttttttttttttttaaataaagatttatttattattgtacactgtagctgtcctcagacactccagaagaaggcgccaccttctcctgatcttgttacggatggttgtgagccaccatatggttgctgggaattgaactcatgaccttcagaagagcagtcagtgttcttaaccgctgagccatctctccagccccaatctccctcctttttaagacaaggtttcatacaaccccggccaaccccggctggcctcaatcaagtatttactttgctgagactggccttgaactcctgaccttcctgcattagcatcccaaaggctgggattacaagtattcactaccacacccaacagatattgcttgagtcacagatctgtctcacattagttaacctttctcaactgcaaccggctcacctacaccaggcaatgggtgcgaaccgctggggtcaggacaagggatgaatggcgactgcccactgatctaaggtttgctgtgttgtggctgaaaggggatataaactagattttctcctaatccagatgccctttcctgacctaccctggctgtaaatctaaacaggcaagatagataataactgctgattcttgtctgtctcttccagaaggtatttacgagactgtcggcttgcaacactcggagaaaaagttcccatactaacttgctcactgcctggcaagccctggatccatttctccctcctgtcctggagtccctgagaatccctcctctcggtgagaatgcaaagcctgccttaagatcaaagccctggcttacttgatcctctcacctgctcttcctttttagcactattggctgtggttggctttattaagctctacctccttgaggtaccagggaacatcagaggggggctgtttggcaggacctctgtcctgagaacacctttgtgttgggaagctgggggctggtatagaaaggagtcacccatagggtgacagtgcttttggttctgctttctcagagcaatgttctagcttcttgggccccttacatcctgcagagaagcaaagatggcctggctggagttctggtcttacttctgtccctgatacccagagaacttgtttttgccttcaagcctgccttggggattcttggagtgggacctgcagtctggtaaacagctgtggtgggtgtggtgctccttctgtcacccacagagtagaagcattcatttatttcaaacctcaatagcttgggtgctctctctctctctgtgtctctgtctctctctctgcatcttcagcctgtgctttcagtgggaccggcactggaatcccatcagtctttcctgtttggtatttttcatgctgagcagcaccgagcatcccctgactcttcctccctcttgcacccgtgaaatggtgcagatgccttagatggtgggggaacttgaggctggatggaataagtgtccatcatccacaggtcatgacccacaggatggctcacagggctccaggcccccacaagaaaactattgttcaacggagactcaggaagtggctttcatcgtcttgacagtttctgaatgtggcaaggggtggctactctactgggataagtagttctctaggcagtggcatctagttctttttttacaaccccctgtgtagaagccaaatgaataaagcaaaactctcagtatgcagtcataatttgtctagcctggagcctgtccaggagatgagaaggctgcaggggactgtggcagggacagtcccacgctaggcaccgtgagcgccttatctgctctctgccacgcagcacacactgacctagcacgtggcttttgcccctaggcagagctacctgtgtgttggaaggctagcccatcctctccatccctcaccccagacagccctcaagtaaggatggagaagggactaagcgatggtgactaagtacttcttctgtggctcctcactggtgagagtgagggggtgagtaacagagccgcaggcaggctgagccccaggagcccatggcacataccatgcctaacagccacacttcgctgcggtctctccctctcacccatgctcctacttctctacagtttagctggagccttgacctcccccaccacacacatcctggatcccttcccctctactcgcaggcgccagtgcttggacttctatgcagaaagctcaagccctgcatcatctggtagggtcacagctgcagatgtagacacctcctaccgtgggtggatgccctcatcccctccctatccccttcagcctcttggtttggatgggcttagaaagtagacacctggctgagccccaggcagccctggccttgcacaagtctctctcgtagggcggggagagatgagctaattctgtgagaggcaggaagaatggccttctgacaagaagaggcctgtcccctctggctcttggggcactattgcaagctgcctgtatagagaaacagctgagccgcctaggagttgcttctgttctgaacacccctaacaactccaatgagctccgaaggaatagagggaagggtgggaacacacccacctcctttgtagttgatagatcttgtaagtcaatattttgggacagtgcttattttctgtgcctagtgtactcaagggcagcttctgtacctgacaactctaaaactaactaactaactaactaactaactaactaactaactctctctctctttcacacacacgcatacacacacacttacatgctttctccctgtctctgctacctctgtctctgtctctctctctcactctctcacacacacattcctaaataaataaaaacaatctgctcagtctatatagtgctacttatacagatgttttgagggctgaccacttagtgttggacggccattcggtatgctcttccttggtaagctggttggtgtttttaaaaggttaacctgacgacatcccaggcattcccacatggcccttgtttttagtggccactgtggccatggagaaactcagccctttccctgagtgcaatgctcttcccacatctgcctgctttctaacacagctctgcctcttctccaaagtgaggttttaataccctggggatcatccaactgccctcccccccagttccttagcctgggaatgctgggcccacaagtttcctcccactggtcctctttgttgaagagcagagcaaggttacaggagcccatggcacagccctcagcgagatgggagttgggggaaccagggtcattgccccagtcttcctgggtcactcaggaggagggatagcttcctggggcccaaactggactcgctttcaagcaaattctgtcactagcactgagaactatagggctggagtctgtctgtccctctcagagcctcgatttcctcctctgtaaatgggtgtgctaacaacagagccccagtgacctctcccatggcacagagaacacaggttttggccacaacacatatctgatggttagtcagttcccacaggctggcagtaaaatccagagccatttccatgggatctggcctgggaggggcagaaggccctgcagaaggaaggaagccaagccctcccccacagcccagctctgcagagttcacatgggggtgggggtggggatggtgtccaggaggaagtctgtcccctggccttgagaaggtgccccagcctgccaggcaggctggtgtttcaaggacaaggccttgccttcctgctatctctgggggaactggcagccactaacaaatcccctgcaatctgcacccaccaatcctgcctgctcgctgggcagccgagagccgtttttcacggggagctgcacacagctttgtcttagagagacagctctggcgggtgcccctgaatggggctatttgtcctccatgctgaagggaaggcagctgaatgctctgttggggtgggcagaggcagagagggtggagaaaggctatgggggagggtgaaggtagagatagcagccacgacactatgagagaccagaagtgctgtccaccacggaggtgtctcagagtcaccatgcagctcggtgagtgcaaaaaaaaaccttgtttccacagcaatgggacactggtatatgaccggccttccctagtgtaaagagccctggctggtagaagttgaaatgacctgactggttttgggtgcctttgtcccatcccagccccacgacaaattaactacggggctgccacactagtgccgtagaaggccccattccagcccctatccctgaactgagagctctagagtgagacccagtatctcttaagagcctcttccacagatcacaggcagagagaggcaaggcatgtctcagtgtctccactaagaccagctgacatctgacaggcacatgactcattagggaaacagagcaggcatgcatctggggacttaaagccagcaagcgacattatttccactcccgttctgggacctgggctgctgtactggaaggtgtgcttagaacagaggtcagaggtcagagaacccagtagactttacccatcttggggatgcagacccaaggtttccattcaaaggatgcagaacatctgcgtgatggtgctactccacgaagagcaagtaagtgcacataactaacaggcatgtcctaaaaccacacagcagtcccacgtccacagccagctctgggcagcctggctgtgttaagattggcaaacaccctctgcctgtccccacttgaatcattcctctgcctcctgtggtcccttctccaaaagcttggctggtgcctgtcaggatggcctgggtattcttgatgcctcccacagtagctgggtgcctattctaccaatagtccctttaaaccacccaagcatccaagcattggctatgccagggagaagaaagaagacaaaaaaaaaaaaaaaaaaaaaaagcagctggcacccccacctgtgccccagccccattatggatagcttggggcgcatcttcctttcctttggtccctgggctgcttaccttctgggctctgacattctctattctgctatttcaacatgtgctggctgctcagagggtcagctgaggctacatagatctattcaagcatagacaccagcggaggcatgcaggcaactcttggggaccctcggacatggcgactgcctggtttctcgctcccatgtaggctgaacagaaggctgaaccactgagtgagcgcccaagaggctgacattacagtacagcctgccaagttactctgggctggcatgcggtggtggagggggctgatgggcattgctacagccttggaggagagcctgggatgtgtcaggtgctgggggctgggcaggtgaccttctatctaggaaggggtggggggtgtgggagggtgcagccggcccctcaggagcctcaagatgaggatgcaagtgcatgtgcgcatgcgtgctcctgctcccgtgcgcgcagaggctaaaggctgcagcagaacaaagagttgggggctgggcatcagagggccccacgtggaggcggctgcctgggcggcttgctgtagtgtctgggctgtgctcagctctgcattccgtctctgtctctctcattttcgtgccatacagtgctgcccccaggcctgagcctgctcaccgtcaccaccctgctcactgccacaaccacgcacacagcccaactctttggtagcattcttgacaaagcatctcccctcacagcatgatctcattgcagggccttctcaggccccagcctggcctcctgacaggcgagacagaaggcagaagggtgggagaggcgcccatagatgcagctagttgcgcgtgcacacactgctcagccattccgtaacagtcatacaccacccccagaacccacacacatctgtgaacacctataggtctctgtgcactgaaacccctccaccatcacaggactcctcaggtacatgtgttcatactcaacagtcagacataccaggcatgagcatacacgagtatgcaaacagacagacagacatgtgcatgtgcatgacatacagccacacacacagagatgcagaccttgtacacacatacccatacagtcagacataccaggcatgaacatatatgatcatgcaaacacacatatatacatacatatacacattacatacatatgtacataaatacacacataatacaatgtacacatgcatggccacacacagaccatgtacatacccacacagccagaaataccaggcatgaatacacagggagatggccttgaacacacttatagcactccacactcacaatgcacacatgcacgatacttatagcactcgacactcacaatgcacacaggcacgatccacagccacgagacgcacatacttcacataaagacacacatgcatgcacagccatacacatgtagagccacatgtacccagtgtggggttaaagtctgagagcaaggaaactcggaaagtcacagaaagtcaaggaagatagatatggccaagaataatgaggaagggacagtcagcagaggccctcagggaggaaggacagcaacactgcacaggcaactagacaaagtggagtctaggcaaatggggcagacggggggggggggagcagctggggtgccatagtctctgagcacagagtgccaggaccaaggcctcttgggagacttaggaaagccatgtgcaccagaagggcaggttacatctggtcatggacccacttatccacagagctaagggggagtgatgtgcattttgggcggaaaggaggggtcaggagatgtgttgcagacagacacacggagaacgacggctggaaagtggcatgtgctggtgtccaccatgtcaagtaccacctgggcatctttcctggcccacattgagagagccagccctctgagttcccagaggcatctgtgcaccagggctgcaagcctccaaccacaggtctgagccaggcaaggtggctgagagatcaaccttgggcccagcaagcccctcatcccttgaaagaaaccagctgagagcctgcagcctatcaagcagggatgcccttacacacctagggaagctggcgagtcaggactgttgggtctgaggggtctgacaggtctgcctcctaacaaggggacattccacttctgccaaggcacaggcatgctggcttaccagctgacaaaggagttacatggacaaaggaacaaacggacgacactttgccttaggcccagcacgggaaggggtgctgtgaactgtgaccttgcccagctgtgacgcagacagggagaacaaacctgagtgtcagaatcagaatgctgaaaatggctcttggaaagtgcagcatcctgctgccgtgccaagcgagaggatgcttggatcctagacaggagtcagctgagatggagcaggcaaagccctcagaggaggctgcagtcccggttccagctggatcgtttgttagctgtgtgaccgcagacaacccccaagacttttctgaacttcagtggcctcatccgtaaatgtagataatattctgtgcctcacaaagctgaggtttactgtgctttagagactattgtatgagccattgggagaggggtttaaaagacccagaggtcaggtttcacagggcatgaggcttccccctgtaccaaggactacttctggcttccagaatgcccattctcccattggccttgtctctctttgcctacatgatctttcttgactttgcctattatctacctatctatctacccatctatccatcatccatccatccatccatccacctattcatccatccatccacccacctacctatctacccatctatctatatccgtatggaacccagggtctcatagatgctaggtgtcctggttagttttctatcagcttgacataggtggggtcatctgagaagacagaactgcacttgagactatgcctccatcagattggcctctggcaagtctgcgggacattttcctgactaatgattgatgtgggagggcccaggtcactgtgggtggtgccaaccccaggcaggtggtcctggattgcataaataaaccaactgagcaagccacgagaagcaagccaataagcagcattactccatggtctttgcttcagttcctgcctccaggtttctgccttgagtcagccctgactttccttcctgatggaatagggttatctgtagatggaaataaatcctttactctccacgttgctttggatcatggaagtttatcacagcaataaaaaacagcaaagacactagacaagcatcttaccactatgccatgccccagtggcctccttagagacatgacactgtcccctatgtccacactgatctctggcctataaagttattctttgtgctagcagagatgggatgtcatagcctgggattttagccatgttcccattacctttaggacagagaacacaacctttaagacagggtctacatgattcagctgccgttggcttcagcagcctccctctggccctgtgctcttgcctctaggtttcagaactaccgtccttgttttaattctgacacaaagccctgtcctcttcccactcaaggacctttgcacatcgtgctcctttcacctgtgaaggaattgtcacacattcaactcttgctcaactttgggaagcttcccttgaccctgctccgagccttccttcacagcactgagtacggcctgaacctgcagacacttcaacaagcgtgtactctccatgtgcatgcatgtgcacaccccccccacacacacacattacagtcatctgtccacttagtccgaagcaatcaagagtgttagtcgtcctgacccactctccatgctttacgtgtttctagaacttaccacgacccctgcaaggcaagtctcattattcctactttcccaaggaagtcaaactgaggcctagagatcacagctagcaagggcactcccaacagtcagttgtctgtgttttttaaaatccaaatggatccactgtctacacatatttatgaggcaggtgtaaaagtggatcattaagaaagcaaacaaacagaaaaatggagatgggagtccatctttttttgcccaggttgcccccaaatcccagtaactctaatgtgttcccttcaaaacagaatgcaggctaggaccttcccagacctctgtcaacacggactcaggaccccttgctgtggccacgtctcaatagacaatgttttgcagaagacatttttttttttttagaaatgctagattgacaggttctgttttgtttttgagtgggttttgaatgaatgagtaaatgaatgaatgaatgaatgaatgaatgagtgaatggtgggcaaggatcactgtgcatactaactgcaatactgacctgactatgtataactccatgaccaggaaaacctcttctgcttccctaaacctcactgtcctcactggtgcaattggatagataacacaaggcattcgccaagtgcccacagcagtgatggcacgtgaagatgcttgacctgcctttaggtcagtgcctgtgctggggtgtaacaaatctgagtgttgtccctctgctgggagacacccagggctgagccctatctgtaagccatagagctgatcacccttggaggcttgcaccgcccctagaccaaacaaggctcctcccaccttctgcatccacctgtcaagccccagacaggtcagtacttaccagcagacttgggggtgaacttgtctcgatttgcggcgcacacagccaagagtctgtagcccaggtccaggtcaaacccttgttgggcagccacacggctgacaacctgacagcaggaagaggaaatccagggtgagttaccattccctcagagctgagcctgagtaggtacacatacccacaacaataatgaagcaggcaaaggcgccaggctgtggcaggggtcaaaggccagatggagttaggattctagcatgtctctttgaatggcttgaatgatgacctagctaggcattagcttgacatgtagtaccgccttcgctagagtggctccagctaggtgcttgcatcaccccatagctgctcaccttacctgagtcctagccccaggatgcttctcttccctcggcctcctgccactatgtctgggcttctgttcctacctcagcaggtactcactacctctgctgctcccaggcaccagcatattttggggtatctcctggagatgtcctgcatcccctactctcctgcatcaacagccataccctgagaagcagagacttgggatttgctgctcttccagtagtttacaggcagagttgcctatagaatggcaaaggcccctggaccaggtggacaggtgaaccctgtactctggagctcagccgggggtctgacttggcactaagtccttagagtaagcccctaaatcttactcatctggagagataggtgccttgttggggtactgtgtggaactggggtgccccaaggaccaaagagaggcccgggaggctcctgcatctgattctgtcccaagaagacctatccctgggtgaccaggtctgtactcccatctcattaacaatggccagacaatgcttccttgttaaggagggaggagcttagaaaatgcactcacccaggagagccactggggaagccaaggctgagtgggaggctgctcccttccagctgctgaggaagggaggctgaaccctcaggcctctgggctctgccctacttggatgctgttgaggggcctcaggctgcagagggtttagggccatccagggccatcacaatagcatcccacttagggtgggggagggctcaccacaagggttctatgactgaaagggaaaatcctttcaaccaagcctgtgaggccagctctccttttcctctccttgcatcccattctctctctctctctttggaagggtaccactgtgcagcccagtctggcttcccaacttgtgatcctttcgagtgctgagactgcagatgtaccaccatgcctggctccatctcctgtttttaactgaagggacacagaaggtcaggagtgtaacagaatgagggaggagggagcagagtgtcctttcccagtacctgccagaccagagctctagacccctgtcctggaaaacccctgcaggcccaaagccagctgggatgggaggaagcagctaatctcacttggggatgttttctcggtttcagatgcaaagagaatccttccatgctccccagactctttcccatgggctccctggctctgtttgctctcaagtctttagcccagtagaatggagcttccttaccggctgcctcagccttgatccctaataggatctggcctgtggaggtttccaagtttctagtcagggactcaggggagtgggggaaggttctggactttctgagctgcagcttagatgctgccttcggtgttttccgtttcgaagcacccgggagctcagccattggggtcactgtgtctgactggtgcaatgctaagggttatgccggcccaagaaacagtaggtctgctgtggccaagtctggcatgctttgggcacaagttgtcttttgttgcttaaagaaaggggctttgctcaagatcatatagcaaagatatgacagagcaagcaagccagagcatgtgacactacacagcctcacgtgctgcccagcccttggctgagtctgagcccccatgaaggtctcataaggtatggtccttttggccattggtaaggtatattggtaaaatgggcagattatatctcagacaggcctgttgtatcccagggtcctgtagttggcctagactggatacatgctagaaaccagctcatctaaggccgtccttctaggcatggctggcaggaacctagacgttaagaggggcggctggcagggtgtttagtttcaatacttcagaaggtgaaactattgtcccagagacaagacttgcttacagtatcacagggtgctgcagcagctgctgcgtctctgaagttagggatgaatctggggtgtgcatgtgcccctcacagtcatctcaagtgactatctactccctgggcctcagttccttcacctgtgaaacggggacaaatgttcttatgactagtagattggagtgagtccagacaggcctccaagggttgattgaggtggccagtggcctagagactcatatttgagttgactctgggcagcttagaagttggtggcaaaacaaacagacaaacacaaaccaaaccaaacaaaaaaaaccctaaaaatcaaaaccaaaccaacaacaacaaaaccctccacacccatttgttctttgcagctgagtggtttttaatttatatcctcaaaataagccgatctggaggaatttagaactagctaccagaggtcaccgagggaactgtgtcaacctgcaggcttagctacccaaggctagcgagggacccaagcctgcagagtgtgtgtgtgtgtgtgtgtgtgtgtgtgtgtgtgtgtgtgtgcgtgtgtgtgctggggagggcttagcctctcctgccctgcagtcgtctcttcctgcaggaaacactgaggtaaagatagtaacttcctactctgcctatgctgttcacttgcaggacagagtcccacaactactttgcacttggacacaactctcagtctcccgcttctttgctaccagagcctgtcccttccagctgacaccttggctctgttctcctaacaaggccttctgagttcctattgtgtttcatggctactgtggtggcccacagcagggagtaggtaaatgtctgctgaacgactaagtgaacgacaagcaagacaggactagcctctggtccatccacggtggccagggccagtgtcccccttgagtgcatgatgtaggcagggccaagcctggggcagtatgctggagtagcatattagtttgtttagcaacatcctgtgcatggccccagcccctcttcccactacagttacaggaaactggggtgggaactgtggcctaggcaacatctggccctctccatggggcttaggctgggcccagatcctgcaaagaggattagacagctgggcggagaggggagcttggggactgaaggataaggaagacagggccacgcaggtggcttgagtgagacagatggggccagcttctaatagactaaccctgggaggctctgtgccatgttttagatggactggaacaccccctttaggttcacatgggcctcagctagagaccaagatgcttttaagactgggtggcatggcagtcagttctgagtctttgtgtcttcctctgtaaaatagaaagcttgaaagacaggtggattctgggaggaggcacatgccacaagcatttcagcctttctcagaacaagatagcctaatgtggtcatcatgtctcctcttctaaaccagagctaagctcggttctttgtccctctcctgtctggagcaccttaggagacaacattcctgcctggccctgcatctctagcctacattccacactcaggacacgcaggctccacacagtgtgattcacactcccttctaagcccactacaggtcttctgaggaactgtcctaatgcaggccacatggctgggggacatttaaaagctacagaagactcccaggttctttctagcctcaagttcgggcaggttcaatatcctgtctagtctggacccagttctctggacaccaggggcctttgcacacgctgctttgtggcccagggacactctggctgtgctcagcaacctggtaagttgtgtcatatgtaggcgtggttttacatgactagccccacctcccagctggcaaagagtcacaccccgctcctgtcacctgtactgttattctcagacattcctccacattgctgctccttactaagaaatcaagcttaagaaagttttttttttttttttttttttttttttttatcttggggttatccaggacttggcagaggggaccacaagtgataaatgagggatcaatcaaggtctatttgtccagacggatgaatgtcacaggggctctatacctgctcttgagtggacagacagacaaccagagcgaagctcaataaatgctcagccgataaaggaataaatggccttgggaaaagaaggctgagtcctccgagctcccctgcctctgagggagcactggtcccccactgtgtgcttctcatcaagtgtgaggaagccacacatcccataaagacggtctccatatcagacctggcagtggggttgtgtgctcctgcagggccagcttgcagcatgggcagctgttcccccagcatttggggcccacagaaaggtatgtgggcaggacttctgaccccagggccatgcttcccagtgtgctatgaaggggaagttgaagactcaccgtcaggcagcccatgaggctctgctcaaagggcctctggaaggctcgagggtctccacaccaatccagcagctctgtagcagcattgtggaagttggcggggttctgtaagtgctgtggagaaaaaaagagaaagacttgaggctgcaagaagaggtcagggaacagaggagcacaggactagccaggaaggagacacacagaaagaaggggcagaaggctggtgggattctccagctttctcaaacaccctctatgcaaagcctggcccatggcagcagatgagaccagcggacctatttccgggatgagaatcagggctagtaaaggccagagccatcagacatccaggtgctctgtggatgcaggtggctggggaggggtcccagggggattttagaaggtggtacccgtctctatacttgcggccagcaggctgtggcggtgtcttcctaacaacccaccccctcaccctctactccagctctggtcctccctgtgtgtgtctgaggaggaggacaccctgggaagggagacgtggtctacatgctgtctataggatggtgtgtgtggcttagtgttcttagcttcaaaggccagctcctcaggtcttgatctgagcccttttggagcctcttcctcatgcctcacacataggaaagtcagaatcctggggctttcagagatacttgaggccccaggctgccagcatggaggagttgacgagatctcacttcatcctttatatggaccctcagcttcctgggtccttgtcatttggcactgggaccaggagagagaagaccagggctgtggggcaagttagagccacagctgcgatttgacctagtggtaggtatgagcccagaggttatcatgtagaaaccagattcatgcatacaggatgctagcagctccaggccccttggtattggtaggatagcaggatctcactggcctagatgggccctgtaactcctctgtggcatgagtcaattcacagccagggcagagtgggtcttggggttggcgccccagaatgaggctgtgggagcccttctggggttagggttctggggtcactcactctgcctgtgccccttattaatctaggatggtcctttcacctctcccatcctcagtcacccatctgtaagatggggttgggagactcccatgtggtcatgggaattttggttccttgtgcttatcagagtatggttcgtgcatggaaacgcttgcagcgagaagcaagtgagctcaaaaaaaaaccccctctccacgaagaagagacagagggagaaaaaagggcaagcgagcagtaacagcctgtgtcatgggggtcagatgacaattaaacaagaccagctgggcttgtgtggtccaggcacagcacctggcaggtagcatggttccaccggcagctgccctgggctcagggttagggttaggtctcagcctttcagaggctccccacctcctctgcaggagcccagcagctctcccgcttggctctctaaagctgcagctccttgatcaccaagccagggaggggccgctgcatacatagccacgcccttggggaggatggctgcttggcttctgcttctggtgttcacttctaaatctgcctttcagaggccccagggagcactggggctctgatggagcgttgcagctcaactcagcagctccttctggcttgcgctcccctgacaaccaggtgtttcatttatttatgtgatgccacgaccaatcagcatggccagcaagccgcacatgcacctactctcaggtgaccatagcaatgctctttggagacctgagctcctgagtggcctctgaggctgatcccccaagcc

SEQ ID NO: 1632 - DNA, 3500 bp, Mus musculus
cgagcggcggcggcggcgggcgcccgggagagcaagctgccggccgggcgagcagcgatccggctgcagagcaagcgagcagcgcccgcgcagcgcgctgaccctagccccggccggtgaggagccggagccggagtcggagccgagtggatttccgcgctctcgctgcgctcctcccggctccagcctgccctacacggcggtggcggcggcgcgtcctccagcggtggcagtggtgctcgcagcgcccggactcagacagcatagaatctactcagcatctccttcgccacagcctcccttccccaacatcacattagccttgagttgtgatcgactggcaggagccctagcaggaggatggaccttgagtgaagtggaagagctgctggaccacgttcatggctctcgggtaggacccagcgaaacggccagaatgaattctatggacaggcacatccagcagaccaatgaccgtctgcagtgcatcaagcagcacttacagaaccccgccaacttccacaatgctgctacagagctgctggattggtgtggagaccctcgagccttccagaggccctttgagcagagcctcatgggctgcctgacggttgtcagccgtgtggctgcccaacaagggtttgacctggacctgggctacagactcttggctgtgtgcgccgcaaatcgagacaagttcacccccaagtctgctgccctgctgtcctcctggtgtgaagaacttggccgcctgctgctgctgcgacatcagaagagccgccagaacgacccccctgggaaactgcccatgcagccccccctcagctccatgagctccatgaaacccactctgtcgcacagtgatgggtcatttccttatgactctgtcccttggcagcagaacaccaatcagcctcccggctccctctccgtggtcaccacggtgtggggagtgaccaacacatcccagagtcaggtcctcgggaaccctatggccaatgccaacaaccctatgaatccaggtggcaaccccatggcatcaggcatgagcaccagcaaccccggcatcaactccccacagttcgcagggcaacagcaacagttctccaccaaagctggccctgcacagccctatatccagcccaacatgtacggccgacctggctaccctggtagcgggggctttggggccagcctgaaccctgccggcatggcagctggcatgacaccctcgggcatgagcggccctcccatgggcatgaaccagccccgaccacccggcatcagcccctttggcacacacgggcaaaggatgccccagcagacctacccaggcccccggccccagtcccttcctattcagagcataaagaggccatacccgggagagcccaactatggaaaccagcaatatggaccaaacagccagttccccacccagccaggccagtaccctacccctaaccccccaaggccactcacatctcccaactaccctggacaaaggatgccgagccaacccagcaccggacagtacccaccccccacagtcaacatggggcagtattacaagccagaacagtttaatggacagaacaacaccttctcctccggaagcagctacagcagctacagccaagggagcgtcaacaggtgcagctgctgcagcagcggccgctggatgggtgaagtcagcaggaggccgagtatgtggagggatgcccatgcctgctggggcactaggacccccagggtaactgtcaagcggaatttcagcagtgtggctgcctcctcgggcaacacaactctcaatggggaggatggcgtggagcagaccgccatcaaggtgtctctgaagtgccccatcacattccggcgcatacagctgcctgctcgaggccacgattgcaagcatgtgcagtgctttgacctggagtcatacctccaactgaattgtgagcgagggacctggaggtgtcccgtgtgcaataaaactgctctgctcgagggtctggaagtggatcagtacatgtgggggatcctgaacgccatccaacactccgagtttgaagaggtcaccattgaccccacgtgcagctggcggccagtacccatcaagtcagacctccacatcaaggatgaccccgatggcatcccctcaaagcggttcaaaaccatgagccccagccagatgatcatgcccaatgtcatggagatgatcgccgctctgggccctggcccgtctccctaccccctcccacctcctcctgggggcaccagctccaacgactacagcagccaaggaaacaactaccagggtcatggcaactttgacttcccccatgggaatcccggagggacatccatgaacgacttcatgcacggtcccccccagctctcgcacccaccggacatgcccaacaacatggccgccctcgagaaacccctcagtcaccccatgcaggaaactcctccccggcagccaccacaggccgctcccggcaaccatccacacagcgacctgacctttaacccctcctcagccttagagggtcaggccggagcacagggagcatccgacatgccggaaccttcactggatctactgccggaactcacaaacccggatgagcttctttcctacctggacccccccgaccttccaagcaatagcaacgatgacctcctgtctctctttgagaacaactgaaggccactctccactggggccatccctccccactctgcctcctaccccatctgtcccacatcctattcctcccaggagcccatgctcaggcctcccacaccaggacctcaggctgagagctgagcagagcacactaggcagggaaagccatgtgggtctccagtcctgtttgcctgaatgctctgggatctatgcctagagcaagcctgaagacggcccctggaagacaaacccaagctgagggaatccaggcccagcaagagacatgccaatggcgactgtaggtccctccatgtgtgctgactccagacaaccgaccttccagtgtcccaaagttcttccatgtttttaaaccttatccccgcctcttggcccagagcctccttcagatgactggaacccgaaagaagcctgtgctccggcccccaggccagggtagtggacaagccttggaggagtggtgacagtttgcagcagtgaggaaggacacgcacacacacacacacacaccacagaaaagcacaaccctctggggaggagaccatccctcaaggccgggggtcgtggctttggcctctgacttctaagccaagatgccctgtaaacactctctcagcagaacaaggacaaagtgccgtgtctgagagagagtgccacaccttgtagggactggcaggaaacaggtcagggccttccccagagccaagacaatgcagaggagggctccttaactcagaccagggccatgccttgcggggagcagagagtgtgtgcaccacaccaaagggag

SEQ ID NO: 1633 - DNA, 2427 bp, Mus musculus
atggacaggcacatccagcagaccaatgaccgtctgcagtgcatcaagcagcacttacagaaccccgccaacttccacaatgctgctacagagctgctggattggtgtggagaccctcgagccttccagaggccctttgagcagagcctcatgggctgcctgacggttgtcagccgtgtggctgcccaacaagggtttgacctggacctgggctacagactcttggctgtgtgcgccgcaaatcgagacaagttcacccccaagtctgctgccctgctgtcctcctggtgtgaagaacttggccgcctgctgctgctgcgacatcagaagagccgccagaacgacccccctgggaaactgcccatgcagccccccctcagctccatgagctccatgaaacccactctgtcgcacagtgatgggtcatttccttatgactctgtcccttggcagcagaacaccaatcagcctcccggctccctctccgtggtcaccacggtgtggggagtgaccaacacatcccagagtcaggtcctcgggaaccctatggccaatgccaacaaccctatgaatccaggtggcaaccccatggcatcaggcatgagcaccagcaaccccggcatcaactccccacagttcgcagggcaacagcaacagttctccaccaaagctggccctgcacagccctatatccagcccaacatgtacggccgacctggctaccctggtagcgggggctttggggccagttaccctgggggtcctagtgccccagcaggcatgggcatcctgaaccctgccggcatggcagctggcatgacaccctcgggcatgagcggccctcccatgggcatgaaccagccccgaccacccggcatcagcccctttggcacacacgggcaaaggatgccccagcagacctacccaggcccccggccccagtcccttcctattcagagcataaagaggccatacccgggagagcccaactatggaaaccagcaatatggaccaaacagccagttccccacccagccaggccagtaccctacccctaaccccccaaggccactcacatctcccaactaccctggacaaaggatgccgagccaacccagcaccggacagtacccaccccccacagtcaacatggggcagtattacaagccagaacagtttaatggacagaacaacaccttctcctccggaagcagctacagcagctacagccaagggagcgtcaacaggtgcagctgctgcagcagcggccgctggatgggtgaagtcagcaggaggccgagtatgtggagggatgcccatgcctgctggggcactaggacccccagggtaactgtcaagcggaatttcagcagtgtggctgcctcctcgggcaacacaactctcaatggggaggatggcgtggagcagaccgccatcaaggtgtctctgaagtgccccatcacattccggcgcatacagctgcctgctcgaggccacgattgcaagcatgtgcagtgctttgacctggagtcatacctccaactgaattgtgagcgagggacctggaggtgtcccgtgtgcaataaaactgctctgctcgagggtctggaagtggatcagtacatgtgggggatcctgaacgccatccaacactccgagtttgaagaggtcaccattgaccccacgtgcagctggcggccagtacccatcaagtcagacctccacatcaaggatgaccccgatggcatcccctcaaagcggttcaaaaccatgagccccagccagatgatcatgcccaatgtcatggagatgatcgccgctctgggccctggcccgtctccctaccccctcccacctcctcctgggggcaccagctccaacgactacagcagccaaggaaacaactaccagggtcatggcaactttgacttcccccatgggaatcccggagggacatccatgaacgacttcatgcacggtcccccccagctctcgcacccaccggacatgcccaacaacatggccgccctcgagaaacccctcagtcaccccatgcaggaaactatgccccacgctggcagttctgaccagccccatccctccatacaacaaggtttgcacgtaccacaccccagcagccaggcagggcctccattacatcacagtggggctcctcctccttcccagcctccccggcagccaccacaggccgctcccggcaaccatccacacagcgacctgacctttaacccctcctcagccttagagggtcaggccggagcacagggagcatccgacatgccggaaccttcactggatctactgccggaactcacaaacccggatgagcttctttcctacctggacccccccgaccttccaagcaatagcaacgatgacctcctgtctctctttgagaacaactga

SEQ ID NO: 1634 - DNA, 94529 bp, Homo sapiens
ttgcacacaatctctgtccccaagaggatgggagtccagacaggagcaggaaatggggttgacatttctaatcctaccagttgctcaaaaccacattggaagtagttatcaccatccccactttacagataaggaaactgaggctcccaaaggtgttgtgagctccccgagggctcacagctctgagtcgcagggttgggattgagggccaggtcatgcggctccaaagtccacgctctttcaacaggcccacgttgcctctcagtctggcagggagataagccgtgtacacaaatagctgcaatcccaggtagaaagtgataagtgccaaacaggggcgataaaggctctgggaggggaggagactgcccactgcgggaggggctagggtgggggtcaggacaggcttcacagagtgggcagcatctctgcgcaagctaagacatgggtcgctgaatccacagtatctagcagtgtctgacattgtcacaggggcccaggaaatatttgtgaaagaaagagaggaaggaagggaggtgaagagggagagagaaaggcagaatgggagggtggctatgctctgaccccatttggcccaggaacttgctcctctcacaggaagacatagtcaagagctgccaccaattagagaaggccttcatggggtccccattgtcctgtgacaccccagagaagtagttcaggactttcaggccagagttcctgacaatcagatgttttgctcaataccagaaagaacttcccaatgagtaaagctagacaagacttctctgcggggcaggggaaatggtgtgttggagcctgttcatatggctcacaagggccgattgttaaattttcaggaactgcgcgagctggttgatggaaccaaccagctgtgccagctggctctggtcggcagcttgaaactggccatggtgggggtatttacaccgtagacatcggcaaatactacaaaccaggttctccccactttggggagccagctgttaaacatttaccagcacaccactggcagaggtctgctatgtgagggagcaagcagcccgtccctggaagagtacaagcaaagacagtctcctcctggcaggaacgaggctaaggggttctttcttagtgaagggctcagagcaaatgatctcagaagccctgttctggctctaagagcctaggaaaagtcgggtttaagaaaaaaaactaaatcaggataattcatgccgggaaatcatgaaccactagacccagagactgggagtagggaagagacctgagaaaatgtgtgaggggccacatgcttggatttctcaggtggaaaactcggtccaaggtgacatggagagtcaggggcaatgctaggactagaacttatgtctctggctgcccatctcacggttccttctaggacatatgggctgggcaactaggaagagggggatctttctgcacgaagtctggtgtctgtctcagaatataagctctgcagcagtgtggaccaaatctgttttgttcactgttggagatctggcatacagcaagtatttaataaatattccttaaaggaatcgatgtgtctgagatcctgtctcctggcagcatttggtcgggtggaggtggtgggggctgggaatgtcatcctctgacaccgtcacttcctgagtccccactgcagcttagtgacatggaatcaagagaccagggttcaaatcccaactctgtcacctcctttgaccttggccaaaccattatgcctcctgaacccttagtttattcttctacgaagtgggttagcaatccctgcctgcctcttgaggctgctgtggcacttgcgtgagacgtcaagtactttttacaaactaaagagctgtgtccacaggaggaagggggtgccaggagagctggctgtggtggcagtgccaacccaagggtccctggtggacactggacagtggccaggatgctgctctcttagaactgctgcttggggtaatctgggtcaaactagccaatagcctgtggagaggaggtctgagtaccagacagctcacgaaaggggcaggaagcagaggatgaaatgaagatggtaagggagagttggagaagtcctttttcctcctaagaccaaaggcagaaggcaaactagcaacttaaaaaactgtttttgtctctgtagagctgttcatcatgttcccctttcccccacaagaccttcactattgcaagaggccttaatgtgtgagctgaggactggcacctgccaagtcaggtgggggtggggtggaaaatcctcatatgtcctagaatcagaccagtgtttcaaacgattttggaagagggatttgtgtcgctctcccagacaagcatcccaagtcccctcctggtagggtgggaggacaggctggcggggagggaggcccagcgcaccccaggctgtgagtggatgaagaaggaaagcagggggtgggggtgctcctccaaccctcccccaagtgccatctgatttttgcaaagagggtgaaggcagcaggaggctcagagccagggccagggaggcaggtggagagggtgtccgtggaggggctgcaccgtcagcctgggcccccagtggaaagcaaaatagaaaggccctgtgtcagcagccaggcccctgggcagccgggctctcggctccattctgttcagtgggattctggttggcaccagctgcagtcaggaacaatgcctggatttctttctttctttctttcttttttccattttaatagaggggggagaaggaccagagccactcattgaacagctcagaattgtggaggcatctgggaccgtgtgtccttgaaaacagcacagtcgcaggggccccacagctggctgcaaggtgcaagaaggcatgatacactgggagctccaggtcccagccctgctgctgtctcatacttgcttgctgtgtgaccttaggcaggtccatgccccactctggcttccccacagccccaccagagcttgccttccaggacccactcaatgccaactcttcttcttccccgaactcttagaatggcattgggtggccgggtgcggtggctcatgcctataatcccagcactttggggggccaaggcgggtggataatgaggtcaggagatgcagaccatcctggttaacatggtgaaaccccatctctactaaaaacacaaaaaattagccgggtatggtggcatagtcccagctactcgggaggctgaggcaggagaatggtgtgaacctgggaggcggagcttgcagtgagccgagatctcaccactgcacactccagcctgggcgacagagcaaaactctgtctcaagaaaaaaaaaaaaaaaaaagaatggcatttggtgtgggcagtccttcctgagagactgtgagcccccagagggctggttctggtcatcctccatcctgtgggcctctatacctcccctgctccggatggcctgtcagcccccaaggccttgcactgggtgatgggatgtagcagtgagccatcctatgacctgcagccttgacagaagagggccatgtaacacaatacctccctagcctgtgaggtgtcatactaggaaatgaaactccctgtgcctcagtttcctcatctgtaaaatgagaatactaatagctcagaggatgggaggagttcatgtgtatgagctactcaatgcctggaacatagcaggaacttcacaagtaattcctatggttatgctgatgttggaggctgggagagcagcatatgggggttaagacaaggaagacggcacatctggtggaggtatcagggtaggcttccaagcaagtggttgcagatgtggccttggtgactgggaggggtgtgtcccaggaggtaggaagagcatgagcaatggcacagaggtaagagtatgtacataatgctggcaattctggaagtcaccctgcatggccacaggatgaggtgagggcaaggaagcatgagtcttgaggctggaggactgcacagccagaaggaggagagatgctgaggatctgagaccttcccccacccctctcggggtgcaggagctgtcaggaaggaagtgggaggcatggtcctcctcaggtcgcttgtcccagacttcctcatcagtgccgcatgtacttgctcctctggaggggcgctgacgcaggtgaggggacactgcatgaggagatgtggctcttgcaccccctcttgtccccccaccgagttgctgggactacaggcatgtgccaccatgcctggctgagacctggctcttgttccagctctggtgcttcccagtggtgcagtcagggaaagccatcacctccttttggggctcagcttagtcacccacaaaagggctgttgtgaggctcagagggtgagaggtgcctcatgaagggaggcgttagggtcattacctattcacagtcctagatagtcacagttctgagcagctccctccaggtattttcttgtccctactccactaaatggccccctctgaaagccctccctaaagcagggccgccctcaaactctaaagtgaactgtagctcagtccaagggttaaaggctcagacctacagaatcttaggacaatcagaggcaaaagtgctggtggatatcccacactctctcacttggcagatggggaacaggcacagggagagtttgtgatgtgctcaggccacacagcaagtcaggcaatggcgggctgggcacataggtgtcccggctcctgaggcaggctcccagcctattctcttgtgactcccatctgaagaaggggttggtggttgaactgggtctcgaaccatagggcagaactccatggtagaaagtgagaagacggctggcttgagggaaggacattggagagtcaagccttggaggatgggaaggtgtgggctcagagaatggaggggccatctgattggaaatgagggggaggcagagcaggggagcctaattcgctgaaggacatagatcttccctgcttgacccaaccactcacctcttagaggcacagggctcagagctgggcagggcccaaatgcttcctgtatccaccaaggggtgaactctaaatgtaatctccattacctcactgccatgggaggcaccctggtcattccctggcaagtgggtgagagtctttacttcaccccaaagtacctggtaggttaccttatctgcaccataacctggcagtgagatgagggcaagtccctattctcaacctcaaggcccagcccaacctggagcccaatctcggctccacccacttagcagctctgagatctttattgttttgtttcgtttttatgagacagggtcatgccctgttgcccagtctggagtgcagtggcacaatcatggctcactacagcctcagcctcccaggatcaagtgatcctccgacctcagcttcccaaatagctgggactacaggtatgtgccaccatgcctggttaatttttgtattttttgtagaggcaaggtcttgctatgttgcccaggctggtctcgaactcctgagctcaagtgatctaccctgccttggcctcctaaagtgcacagattacaggcatgagccaccatgctcagccagctatgagatcttgagcaggtcacttaacctctctgagcctcttcccttagcagggaatgacacctggcttgtggagagaatacaacgaatgtttccaaagtgcgtggcatacagtaagtactcaatgaatgagattttcttcccacctctctagtctcaattttagatgttccctggctcccttaagttccagaagtgagaggtggagagtggggacagagaaggcagctcctggacaggtgggaatccccactgtgtacccgcccccatcccagcccagcctaggaggccatactcgccgcaccctacacaagtcctttgcttccctcagggacctcaagcctcccacccccaccatcctgctggcctccagattttctgcctcctgaaacctgggcccaggccccagcaatggtcctctccccaatctgctggtggctcccacaggacagggaaattaacagcacttgagtgtgctctgaaggttggtacaacctggcggccccacactgcccatgccctcctagtggagccaggtgacttctgggcctgcaggggctgagcaggatgcatcttccagctctgggccacgaggaagtgatggcactgtcctctcttgtctcaccagcagatctccaggcccagtgaggctgaggctttgggggtgaggttgttggacacacagttcccagtgagtcctgatggcaccatggaccttacaggggctcagagggggaaagcagcttgcttggggctacacagtctatggatgaacagagccagggctgaggggacaacaggaaactctgttcatgggggcccgagttcccatcctgaccaatcttgggcaagtcattcacagttgagtttcctctgaaagggggatggtagcggcacctaacttaagacaatgtgacagttcaatcagggaactgaattctcaatacctaggaggacccaccacagtactcaccacatagtagacagtaaataagtcatagcttcttccaagaccccagaggtatccaatctaccccattacctccctggaagatgaacaaagagagcaagggcctcagagacccaaggactggagcctagggaagacccaggaccctggtgggctttctgacttgctgccatgcttgcacagaaggggagggttgaaatgatccctggttccatgctactaagttgagcctacttggctcctctgccctctgcagccacttcctgggtttcagatgtaaatactggtgggagagtagggggctgggatgtggggtagggggtggagcttctggacaggagactttgaacatgagtggtcacctccgaggtcacctgcatcccccaattcctggaagtgggcaggccctggatacttattgaggaatctggacagaaaggttgagagggctgggcgtccagacctagctggtcattaaggcaacaagaactggtctaattgtgggctgggctggattatcacatcccaaatccttaaatacccagaaactctcttttgggattttggacctgggtatggggtggctgctgccactgctgcaatgctgtggattgctgggagtgggacagctgtggctgcagccaccgttctgcaagcttaattcctaccttcggaggtttctcaggtggccctggtgtacctacctgtgaacttaggccacccacaggctgaggaggggctcaatcacacagcaatgtgctgggaccatgactccctggtgtccctagaggtctggaagtgctttcataccacccaccctctccagggatgctcagctgccacctacagggagggcgggggtggaagagcagcagtcatcacagtccatgtccatgtgacaggtaggaagactgaggccccaaaggagtgccttttcttgcacccaatggcatagggaggcagaatttcccctggggaaaataaaataacgcccccactccgccgcctgcgcccccacacaccccgtcccccacgcccgggtggacctaagcagcagttttctgagctttcaggaattccagactgagttcactggctgtgagactagcggagccttgagaatgaattcaaagctggcaaattcattttgcctcctctccctcggtggtggaaggagtgatctctccggctctgaaggagttcaagccgaggtcagcgaagccctcagaaggatgttctaaaatgggggtggggggtatgtgctccggcctgcttccccggttggcccaaggtccgcgctgatcaccgcccaagaggctggtacttttcactgtctgtggacattaaaaaagcgagcggcggcggcgggcgccggggagagcgggcggccgggcggcaggcgggcgagcagcgatcgggcggccgagcgagcgagcaacgccggcgcagcgcggtgaccccagccccagccggcgcggagcaggagccggagccgagcggatctcggcgccctcgctgcgctcctcccggcccgagcctgccctacccggcggtggcggcggcgcgtcctccatcggcggcagcggcgctcgcagcgcccggtaagtttggggccagagccaggcgcccgctggctccggggctacctcccgctccccggggactctcggggtgcaagcgtggggattgggtgctggggtttttcccttaaagtgtcccccggagcggggcgaccggccggcggcgcgggctccgctccgctctccttggcggccgggggccgaggcccggcggccggcgagctcccggctgcgcggagccggcttgggctgcgcgtgggggccgggtttgtcagggtgtgcggggcgtaagtgtggtcgtgcgcgcgcggacccggtgcccgcctcctgccggcgcgcctccagccctcgctccctacacccgggggccgggcaggaccgggaatcggaggagggagggaaggaccgcctcggtctccttcgcctcctctggggagatgcgaagttgtgcgcctgtgtgtgtacaggaaccgctggggaaagcgctggatttcaggatggcaaggggtggtggtgttaacttgtgcgtctgaatttccagggaaaacatacacttttgtaaatgggaggtgggggcgcggttaagttgtttgtgtgggaattgcccggggaaagctggcgcgcggtacaaacgagaaacgcggaggtgtgtgtgcagggttttctcccagggcttcgcaagccagaggggcgctcaggccagtgcctggacggggctgccccggccaggaggggagcccagggggaagatgtgcgtgtgtgtgcgcgcgcgcgttgcaaatacgaaagtaatttccccgtgttctttcttcctctccgtctccggcggcggtggccccgggggagtgggaggccagccggggcggaggttggggggccggggctggagccggggtcgggggggggaggcgggttctggaagcttgcttcacattcctggcgtctgggctggggaaaaaacagtggggagcgcggcctcggcgtctagggcgcgggcagcgggcgcgcgtcgccccctcgctggggacatctgtccaggaagccggccgggcggggatagggcgcggtgcggagggcaggctccccgccctggagcggtgggggcgcgggcgaggggcggccgccttcccggccattgtgcgccagcagattttcacgggagactgccccggagccgccggaaaggccgggagccggctcagccccgggtttaaaagacactccaggaatgtaaacaacccgggcgggagggcgggcggacgggagcgcgccagggcagccggcccgggccccccacccctccccggggacagccggtcggcactgccgcccagccctacccctctacctgcagcaaactttttccttctctgccttcccttcccacctcgtccctccagcaggtcacagagcgagggccgctcccaggtgggccaagggtgcttggtacccttgcctgaccggggaggcctgacggccgggtccctgcttcggtgcccggagccccggctgcgcctgcccgggagccgtcagcttcctgggtaggcagtgcccgagtaactggggctttgagcctgcccgcctgcctccctccctccctccctcccgctgctccttcccccgcgcgctctcccccttctcctctcccctgactgcttttccaatgccctgacatgagggaggaagatttaacttggcagcccaaacaaatgttctctcagaggtcctccaagaagctggcggctgggctggcggggtgagggcacggctcggccagcctttccctcctctctgctctgccacggacatttggagccctctgggtggacagcccagggcatgggagagtagggcccagccccaaagatttaaaagggcagtgggcggccgcctgtggaagcccctggctccgcgccgggtgcagagccgctccgagctgcctcctggtgccaagggttttctgaaggattttcttgagcaacagtttgtctccctgctgcaacctgggaaccgggcctggtagaccagagggttaaccagtgccgactcctcctccctggtgggtgtgaggacaggctggttacacagggcagggcaggaggccagaggctgttcccagaggtgcctgggtttgcttattactgtttttgaaggtacagataaagaggcaggcgccggggctggagagccgggcagcttggcgctggtgaattccagcctgcgttcgctggcgcttgtacggtcccgggagtgtgaagctgctgttgagctatcggggaagttgagatgagagagcaagctctttcttagccttctcagccccggctgctttgtgagggggtccagagtgggggaaattcctggcccctcacttgctggctcctggccccagtgcaggggccgggtgggtttgtgaataccccaagccttgggctgacctttccctcttcaagtcgaggatgttgaaacatcagcatcaaacaaaagacacattgaaagccctatctgctacagagcacgtgtgagttgggggcccagggaatgcatttggagggagatggtgttttcttctgagctttatgattttcggttgggttttgttttcccccaaaggacagaagcgtctccttgtcccaaatcacgaggttttgaaacgctgttttcacatgtaaatctcaaaagtttagacttctgagagttggtggcagtgactgggggtgggggctgggtggggggaggagaagggagcagtagggagtggattcaagaggtggatttggcattttgggtagggcttactgagaagagttgggaataagaaattgctggacttatgaataaatagccttgtctatgcagaaaagggttgctggcttctttgtggggacaaaatgtcccttttccctcctaagcaaaggggggaggagggttcttgttcctctcacagccaggggcaaaatgaagaaaggtccagagactgcggggtttggcgacagaaccagtttctccctcacgcacgcgcgcacgcacactcacttccctagccacaataacaacgatgtctccatccctggcccccatagatatgcctccaacataggacaggtgtccatgcttgactcattccagaaaattgcaggggcaaggacccaactgagaagagctgcagacttcactttttttcctgtttcttcctgatggcgggaggggtgaagggatttaggaaggaaggcactttgaggcctgctgcatcctgagagttttgtcacaagaatacctgcgtataaagccactgaccctgagggtccaacgagtggccatgaccctggcctcagggtgaggcattgttgtaagaaattcaggcaccaaccaattaatttccagaagcttctgtaggcacttggtcgtgggaccaggaagcagggcctgctggttcgtggctgggtcctctacattttcattcataactttgctccccagggccctggcccagcccctgtcactgctgcctggtctttatgaggctccttagattttgtgtggacaacaaaggccaggctgccacgattacccaggacactgctgcagccttgcctggcgacagctctgacctcttagcaggatatagtgctctctgctcatgccctttgggggagtgctctttgtccttaagagtccctcaggatggggaggcagcaatccacctggctgtaagctccggggcgttctgaggttgggccctgcctttagagaggatgaagggaggaggctgagaaaagcagtcctaggcataggctctggggagaggctagaccccatcatgattgagagggtctccctattaccggaggagatgggcgagaggaccaaggtgtcaggaggctgttgcttgctatctgtgttgggccagtaactctcctgtgctggaccttagtctcctgatctgtaaaatgggtctgagggcagaactcctccgatcccacttggttgctgggagaatgaggcagatgtgggcatgagtcccctaggcatgtgtcccttgaaggcctgggaggctctgggtacagaatgggtagaacacaaagggtttagattgcaagtgctagaagcattttgctgaagctgctctcatccagacctacttccctggcagctgattgtccagtcttggcttgcatgccccccacaggacagggtactcattacctcctggaagcctctgccttcagtgggcagttgtgagtgttaacatgttctgctacatgccttctgcaaatccacacctcctgaccccactctgggcttgagatgctggggggccctccagaccatagactcgttctttcctgaatgatcctgggttcaagaccagtgcctaggcaggcccctaggtagggggacacattcaagtggctgcttctagcccttattgggaatgacctgttgtggggggtgcagaagggggaagggtctgcctgggggtgctcactgtcatctgcctttgtgtgccaggtttgcctctgggcactttccttggagcggggtatgagaaggaagggggtgcgtgatgagggctggggttgggtcgggcccggcatgggtgccacaggtgttgactgtgagtgtccaccctgtggataaagactgtgtcctgggagagaccagaactgtggaagacagttcctgttcctcaggagcccacagtccagtgccggcaggaagatcagtccaaataaataattaaccgctaccagctggctgcctgccacgggcgcgtgatgacagtaataaccacagcccctctcctttgtatggtacttggtggatttagaagctttttccatctttgtttatccccaataacaacagtgtaagctagttactatttggaattatccccatttaacagagcagaaaaccaaggttcagagcggtcaaacaactggtggcaaagttaggactgaacctcaggccttaccgataccaacccctgcgctgcctcctttccagtccactgagtgagcgctccagccaggctcggacacggtgcagagtcaggataggctccaaaactgggtgctgggggaatgaggtgaaggaggagccattctcaggaagggtcacagatgggcctcacctgtcttccccctcccatatggcagcacatggtccatgcccccagtagctgtgtccctttcttttggcacagtgtcttacagccagagcttgcttcgagacacaaatcctgccttgactgcccagggcacacaggtctatacatggggcttcatgcccttctccggctctggagtaggaggcagaggtgtttccagccccccgggtccccatgaagcccagtgctcttccttgggttcctatggtttctgtagtccctcttcgggctgagtcagtccccaggctatgtggggcacccactccgtgtgagaccttaggttctttctgccccttgcagcctccacccttgggcctggttttctgtagctcagctgagtgccaccctaggacaaggctgtagctagtggggttcaggccggggagcagccgggcaggctgagctggcacctccccaggaagcctggcccagcctggcacacctgtgcaggtaatgactgtggcttgggagggccccaggccctgcctgtcaggcccagctgctggagttactgcaggattgtgctgggggaggctggggtgtctgagctaattagatttcttagatttcaatgctcccctaatcctgttagtctggctgtaattgtaaccacttgaaggtttcggctgtggcaggctgttgaggacagacggtggggggactgtgctctgccccagccccagctccacccctagacagccagctgagggcctggggactgccttcttaggtcttgaggatgggggcttgagtgatggtgggtgtcgtgtttttctgtagaaactgagtatcgcagactgtcagagtggacatagccctttgagatcacccagctcaaacccttcactgttcagatggggaaacttaggcccacagagggacagagactggctcaggaccttgatggctggtagcagtggagcatcaaagactagtggtctgactttgggatatttgtccctaggcacttcagggaaagtctggaatttccagggactagtgaaccctccagagacttctgcccctagagatagggcttggggggcttcatttgtccccaagcttgttccccagttggcagttacctgtcttatattcccccagccctgtgtgtgtgcacacctgcacacagctgcacacacatgcacacacatgcacacctgcacacatatgcacacatgcacacctgcacacatgcaaacgcatgcacacctgcacacacatgcacacactggccctgctggccagggcttctgccaggactccggctgcctggcccagggtcctgagacctgagagctctctccgtcctcccccaccactcttagccagatacttgccctcttggagcctctgattcaatgcagatcaggaaatggccaagctgttctgatgggggtgtgtgttaaaatacatacactgtactttccccagctctttcttcgaaagttctgttttggtgtctggcttaaatggagatctgtcctctctccccgcaccccattctcacttcccaatccgcaggggatgactggcagggaggatggggacggtgtgccttggatcttcccacttaggtcctgtgctgccctcctcttagctcgggagcttcggggaaagatctggaaagccccttccactgtgaacctctctgactctggggtttgaattcctaagcttgtagcataaaattagtgggaactgattgcgttacctggtctggcctttcctttcctagcccaggaaactgaaccatggaaagaaacacttggtctcatccaaggtcagcagcgaatgggtgaccgatctgggcctggaaccccatctccgccagtccattagctcatgaaacatgtattgagtgtgtgctgttggcctggcacagccccccttagccactcttgagctcattaataaatgctcttcgggtctgatgagaggcccagctgaaccttgggggtggggttcacttctgagtgctcagggtgaggacgaaggatggggagttttcagtggcattcccagactcccagatcctctgcagccaggggagtgtggaacactcctggtctggcattagagcccctgcccagcagcatgtgtctttacagggtggttgcattgtgaatttgagagaagtaaaacagggccgggcacagtggctcatgcctgtaatctcagcactttgggaggcctaggcaggtggatcatgaggtcaggagtttgacaccagcctggtcaaagtagtgaaaccgcatctctgctaaagatacaaaaattatctcggcatgatggtggtgcacgcttgtagtcccagctactcgagaggttgaggcatgagaaacacttgaacccatgaggtggaggttgcagtgagccaagattgcaccactgcactccagcctggatgacagagcaggactctgtctaaaaaaataaataaataaaacaaaacagaaaccatctagggagggtacaaggtttctcatctgccgggacctgtttaagccaagaggatggtagcttcccatacctcccctctcccctccagccagccctccaggagctgacctttgtcctttgcagagcaaatgacccactgacttggtcctgccttcacttcctctgtgtatggggaagcagggaggtggccttctcaccccaccctaggagtcacctgctgagagtcacctttgtcagcctaggtgagagcacactaggaagagccagctaggctcaggacaaaggaggagatgccaggtgcctggaccttgccctgtccacaggggtcccacccaaactcctacccctactccccggtggaccttgaccgccgctgggaagcacagtgcacagctctaaccactcagcgacctagccaaggatcagcagggcacagagacctctgggaagagtcctgaaaccctttcctggtgtgtgcaagtgggacgcgaccttatagggtctctgtccaaccttcttattttccacatggggaaacccaaagcccagagaggtggtgggattggctgggggtcatacagtggggtgtctcactaagagtggggggttctgtggtctgggtggggaggggtggggttttccatcgaaaaatggtgttccatcgaaaaatgctttggtgttcctgctgttgtttacatacttaaaacaacttgccaaaggtctgccataaatataatagccagcatttattgggcaactaatgtgtttcatgcttttcccagactgcctgggttcagccctcagctctgctctttatgagctctgtaactttgggcaagtaatgtttaacttctccgactttggtctccacatctgtaaaacaggcttactagtggtgtagtaataactaacatactacctcctccataggttgagaagatggagtgcgcaaacttcctggcacatagtaagtgctcaagaaaaggtagccctagtcatggtcaccaccagcattcccattgccttacctctgatttacagatgagacggtgaagtcgattgcccaggtcatgtggtgcctggagcccaaccaaagcggcctgctggcacctaggcttcctgatctccaactccctgccgttttccacactcttgtgtagcacaaagggctggcccatcatctctgagaggcccccagtcagtcataacccaagtacattgtaattcaacctactagggcagcttgttccccttggaaaggcgttcgagagggaggtgttgcatctgggcttctgtctgagaagcttatttttttcatgtgtaaactgaggctcataataacaatacctactttttggactcttctcgtgtgaagggaaggaggccacagagggactgggcttgtcagttgtaccctattatgtggaatcactatgaatggtaactgactggaacttctggccagtcactcacccctccgagcctcagtttcctcatctgaagaccatgagccgaaacaacataatctcttcccgaagtggcttctcagggccaccagtccccaaaagcaaaagagagggcagcagagcacccccacccccaagaaattgtcaaacctatttgcctggaggagatggctcagagtaaatagtttgcttcactcagcctttccccagactacagacaccacccacccccgacttttttttttttttttttttttttggagtgcagtggtgcaatctcagctcactgcaacctctgcctcctgggctcaggtgattttcccaccacatcctcctgagtagctgggactacaggcatgcgcacccatgcccagctaatttttgtattttttttttttttttttttgcatatggtgtttcaccatattgcccaggctgatcttgaactgctgggctcaagcaatccacctgcatctgcctcccatagtgctgggattacaagcatgagcaccatgcctagccccaccctttttttaatgcaaaataactatggaaaagaccaatagaccattttgggaaacgcccgcgtaaacagtccctttcagctcaggcattgcagctccatccagcggatggtttacctactgaagaaccacctttccaggggagcctttcacagaggagaggaggggacagtgtctgcagaggcagaagtcttcccctcagcctgctttcttggcctttccacctctttttaacccaccctccagcctcccacttttgccggcctccttgtcttttctttttttgttaccagaccacaaatctgtttgtggttgggcagtcccaagagcaaggccaactgggcagaggggtggggcctctgccatgtccctagagacaggccccagagttttgctggctgtcagagccagaaggggtttgtttcacccgtgggggctgtgggcccccagaacctgtggtcaagcctttgcaaacgtgcactttcctggagaggtggtctgaagccttgtttcagatccttaattcaatgtggacacctggaaacagtgtcgaaactatagccttagtccaagggtctgtagtccctggccgttgaatggagtggaactgtcatgctgcctttctccccctcttccattccacctcagtcgtgtgactcttgaagatgtgaatagatttatgttcacacctcctgcttctaatccagcttgacatgttcctggcaaggaaactgtgaccaagggatgtgaagcgacttgaccaaggccacagggcctggcactggggccgggggggtccagggaatgatgagtgagtggcaggcaggcatggccttctgcagcagctgacttcactgtgaagccatcccatcttgtcctctgtgagacctactaggggtgttgggattcagtgtcccagaaagagctggcactggggtgaaggaagtccccgcccagtccctcttctaggaaggctgggcaggactggtttaggagttgcctcctctgggtcaggaggtcagcttctgctctgcaggctgcattttgtgggtcccgcccaggttcatggttcctcttcgggggctgtggggaccactggcacttatattgaggggcacacggtgtcttcagattgcccggctggtgtaagctggttaggagtccttagctggggttgttgtgctgttggtggggagaggcagcctggggcctccagagagccgctggccggccactctgtaattgtgcatgagtcactctgcctccctgctcgcagtcctcatgtccccaccttcctgggatcctgagaagtgggctttgtgatggttgggagcaagtaaggggatttcttggctctccgcctgtctgccctgtgtgcccggcatacctgagctccacaacctccctgcgcctcagatcctgggagaagagcagaaagctcgggtgtgactttttttttttttttttttttttgagactgagtcttgctttgtcacccaggctggagttcagtggcacgatctcggctcactgcagcctctgcctcccgggttcaagagattctcttgcctcagcctcctgagtagctgggaatataggtgcccacaccaccatgcccagctgatttttgtatttttagtagagacggggttttgccatattggccaggctggtctcgaactcctgacctcaggtgatccgcccgccttggcctcccgaagtgctgggattatagacgtgagtcactgcgccgggcctcaggtgtgatttcttgtttggtgtttggcgatggggctgtgaagctgtgagtttgacgtcagtttatctcctgcaaaagaatggccttctgattcctcccacctggcctgggttgacatctgcatttctgcttgtgcttcatctgcaggactgacccctttaggcagaaggagtgggtctgcattgggggttggaatcctcatgggcctcagaagtcttggcgccttctgccttgtggatggcctccctcctagccagctccccagaggggtctgggcagctctgctccacccgaaggctctggatgctcctatttctggtattcttggcacctttgattcccaagaccattagggaccttggcgcccatctcatctgatgcctgtcatacggatgacttatgccccatctacgctatccccatagagcaccttcccatgtgggcttgcatgcctccacggacaggctgctccctgcctccccagcagctccctctgtctagaaagttccacatcgtatggagcccagaaggatacctctcccctagttctcttctcaggaccttgcagaatgtggtgaatttggtcctcaggaagtctcttccattctctgcctcagagattgtatcctcggagacttctctctgggctgagtctaaggctggagaaggcagaatgggcttcctggggaggtggccttcttatatcccctgggccttattatctctgcctctggtaagagtctgggcagcttggagacctgagacctgacctgaaaatagcctagcccaggttgtaagacgtggcagtaggctggggaggccacaacagtggctcactggggccctaggggaagaaagtggtctggcttctgcttttcaagcagggtcagacattccaggaggctgagaaggccgtctgtcttcctagcctcttgcagcatgctcgcctgccactgcagccagagccccctcactggaggtagccaggggctgtgaatagtgcttcctcccctgtggaccagcacccagctccttactgagctcctctctgcctggccctgccccctgccacttaggcgcatcttgcctaagtgtctacaggcccctgagacctgggctctgtgcaaggagcgctggatttagagacagaacttctggcctcctcctgccagcatcgctgggggctgtcgcacgagtccaaggggaaggccagcacgttgcatgctgtccagtatcactgcatcggggagtgtaatgtttcattaccatgtgcaatgatggtaatggcagcacagaaaggccctggagaccatccaggccaaccttctcatttagatgctgagtcaaaccccagaggggacgaggtcacacgacaagtccctggcagagctggagctaaaatccaggtgttcccaccatctagccagtgcccagccctgcctgttactccacagaaaccctttgctggagtaaggcacaggagaggtgcctccatggctgtggcagtggcactggcctggcctgggactcaccttcctcattttgcaaagcggctgggcctttcggctctggctgtgcccaccagaaacactcgtcctgggggcaggcactcggtgcctatggtcttggtaagacagctggctcctccagcctgggggccgctgccctatagcaggacactttctctcacttcctggcttatatggggctgccttgcattccgccttgggtggcaacagggtcctcaggagcccacctgagaccccacgcccagctttttggctcatcaggctcatttggtggcctagaccatggcttgaatttatggtctgagatgcagcctggtgtgatcccttccaggcccctaagacccaaagatgcccaaactattggagcaggagggacctgggcagccagtctacttaatgcccttctcatcccatttcccagattagagccctgaggccagagagggaaggaatccagctgcagagctgcaggcaggatcccatgtcctcccagcctcactggcttggtctccccctacttccaccctttgcgcccgaggctgtccttggccttcccaggctttgtgtggagtgaaggacgatgggggacaatgggcagagtagcaactgctacttttccctcagggctcctctagacctctgccaggccctgcgtcgcttccagttctggggagcccatgcactgaatgggctgggagggtcctgctggtggggcctcgtgccagcctgagaacaaggcttcctggctgggcttgagtccccagcactctggccctggggagggcagagtctggggtccttttgtgcctcccctcgcccagctacccaaggaaggtggattcatgtattcctttgtcaagtttatcaagcaccttccatgtgccaggcactcttccaggccctggggatacattggtgaatttgacaggggacctgcttacattctagtaggcgagacagtcagcaggtcaacaacttaatgcatgacatcatgcctgagttataatcagtgctttgaagaaaaataaaccaggataaggtgatatagggacatgagtgggtgatggggcttctttagatggtgtggtcagggaaggcttctctgaagaggctgcatttgagcacatacctcagggagacagggaagtgaactccatgaacatttgggagaagagctctccaggcagtgggaacagcatgtgcaaaggccctgtggcagatgcttgtttggcgtggtctgggaaaagcagggaggccagtgtggctagatggagtgagggaaggagagagtggggaggaagtcaacagagtgatcagggaccaggtgataagggacagagagccttatcaagtacaggaagggcttctgacttcatgctcagtgatttggaagccactgaaggattttaagtaaaggactgaggctatcagatgtgtcctctaagatctctggctgatgagccgagaatagactgaagggacaagggtggccacaaggagaccatctgggcagcatttacaggaacccaggaaaggatgctggcggcttggaccagagtgttcagtggaggtagtgaaacaaggtcggatcctgaatgtattttaaagattgactgaggctgtggccaggagcccactgggaatgcctgtccacctccgtgaaacaggctgagctagagaactggctcaagttgctgtgtcctgggagtctgagcccttctccttttgtgcttgtcaattcctgtgcctcagccactctgtcataaggtggccttttaacagttggaaaaatagaggcatagtgggtcttcctgatacccttgtctacccttggaattctgatattctgcatttggtctctctcctcccctctggctgattccctggcattcatcccctgcatgttcatacactccactctatgcaccatagtttcccaacatgttagtcatcctctatcccgaggcctttgcatatgctaagtcctccacctccactcttcagtcaggtgaactcctacccatccttaagagcccagctcaaaagctgccatctttgaactctctcccctgacactctcaggcactgaggatttcttctccactgaaaattctactcctctccctcccacactctattgcaagggatcaactgcgtggggctgggtctgtgccttccttcacacctcctctttctgttctgtgtcctcacagcctggcccagggccagcacagaggagggaacaaaaacatttcagtgtattcctggagcagtagttggttactatggaaacaaggaagtgttgcaacttcctgaacttgaggttggggtcaaagagggcagctctatcttggccacacgggatcaacccaagatggccatgctgaggttcttattaattcaaagtcacttcggacaggctctttcccatccctgagcctcagcttaccccatcaataagatgcaggtgttgggactgcttgactgtctgctctaacgttctgtatccttgtgcctccaatcctgccgtatgaacacaggcaggtcctttgccctctttgagcctcagtttccctattttgttgacctctctccaagaacatagctgcctgagtcaagcaactccagaatcctagggtcagcggctgggctggccgttgatgattgaactgggattcttgtgacttgcagaggcacaaagagggaagtcctgctttccagggtggtggggtgggggtgggggaatgaggcagcaggagggtgggttggtagggataatccaggccggctcactctggcctgaacctgcacaggcccctgggtctcctttcttcaccttgaaggtggcaggagctagtgcttgccaggggcccttggctctgccggacgctgcccgctccgcattctggtgccgtgccatgtagatcccggcctgtgctctgagggccacaggtcctgtggtggccccagaggctgcctgctgcctgtggtggcagggctgagtgggtgggcaccatgttcttactgtgtctcttctctctccacttcattgctcagaagccaagagttagccaagcacaaaaccacagcctggctgctggcaccctcctctgcaaccctgcagcacctgggcaggctggttctgggggctcagcaccagtcaccagggctcggatgtagcctcctcaagctgggggtgggggtcaaggggccaacatgcccagcgtgacgccaggcccgcagttgagttcccacctgccatttgcacatgccattgggcagagtgggcagaggcctcagcccgcataacgccccaccctgactcctgcctggcactcaggtgccgtctggcctgcaccagacccagaaagagtgacctgggatgagaggccttccatggctctctgggcctgcctcctcatctgaaaaatgggcagagggtgcccgcctcccatggccaccaggaggggagacagaggaaggcagcttgtgatctccagagcccaataaacacacttgttaggattaccagcagcaggcaacaggcttcagcccaagagatgcccctgagaacctctttttcaggaagcaaaagcccaaaccttttcagaatgagactcttattctgggaatgagaagtgcctctccctctgtttctgagctgtgcccagtggccagggacctgagtggccatcacaacgtgcctttcccgcctaccactgctccctggctttctagggttggagttggatgaaacccctggggcagcaccgggcactggaagggccctggtaagggagaggatacccactgcccatctctgccactcatcagcttcctgaccctgacgagtccttgtctctctgccctctgtgcattgaggccccttctagctgggactctcctttggagtctactggagcatttttacctccaggataggtgaggctccctactccagacccccaggatgtaatgtgggtctcacctcaactcacaaaattctcacttctgttaagaaagggccttgccatggttgacggggatttgcacttcaccgtgtggacagtgacagaatgcgtctccccgcccctccttacctggcaaactttgtcattacctcctcccagggacctcctaggcattctcctctggactccctcagccctcagccttctcctcctcccggtaccagctaggtcagacaagacctggagcagagaaggtgcccagtaaagcctgatgagttcttgaatgatcaagtgaaagccctcaggtatccagatagttcagttggccagaaagcccatttttctcagattttactcagctatgtttgcttgttcagcatatagaatcctttttatttttattacttcattttattttgtagaaactgggtctcagtctgtcacccaggctggagtacagtggtgtgatcatggcttactgcagtctcgaactcctggactcaagcgatcctcccacctctgcctcctgctgggactaccggcacgagccatcaccccggctaattgaaaaaaattttttttgtaaagacgaggtcttgctttgttacctaggctggtaggatcttttgttatttattttttattttttaatttttattttttttaaagataatctttttggaagctctgtgtccaggactgattctctatacctttggccaatctctttcttttaaaaccagggtttcctgaattgcatttttgcatttcttttatttacctggtctgtgcaactatttttttctcttttggactccatatagcaaataattctgcctctccttttatttgaatttctcatgccaaaaaggcagggagggttagtaaacactgctttggttgttctttgttttgttaagtgtttttaacttcttagtgtgttagattagattttatctgcctttcctacctgccttaaccccaggcctctaaccctccaccttcccattgcttgttcactggcattgtgtctcctaggacagctgtgtgtggtagcgcatgttgcgcactgcacaagttgggggtggtactcacattttagtcccctcacattatacatgtattagatgattttttggcaggtgatggtaaagtgttggaggaaggggagcctggttctaattctcataaagccaccttggattaggagtaggctgacattgtcccatggtcctggctgaaattgggaagtcattttgactcctccccagggctgtaccccgtgacattgggtgtccatgtccccattcccctgcccagagcatggcttatgggagtatgtagtcagggaactgatgtctttggactccaccttctggatgtttctccagccacctctcctgtctacatccccaggcagcaaccttctccctcaggtgtctacctccagcttccccttttccatcgccccttcacttggctaccagtgtgaacctgaataaaaggcacccctgatctatcacctcttccactctacttaaaactccttcgtgcctctctacgatctacaatctgaaattcagtgcccttcattctctggccccagatgaactttcacttgtgtgtgctttgcacgttgtgttcctctctgctctgtctgcctggagaactcctaggcatcctgcaaactctgcccaagcctcagcttgccctcatgcaccagctaggtcaagcggattggtcctccccttgccccggttccccaggcactgtttcctgaccagtgttgcagcccttgcttggcaggatcgcagctacctttagaataccacagccaccaccaggctctggctccctgtcacccagcagcaccagcttggatctagcaaacattccagtgcgctccctgcaagttgaataacacatggtggctaccctttcccagagctggtcggctttgtgatgtggaccatgtgcatggtctgacccctggccccttcttttgccctttcccctgccagccaaagccagagagatggctgggccatgccaggctcccaggagcgctttgtgggtcaggttgttttgcccaaagctactgggtctgaggatacctgtgagcttgctgtgcctgcattgccgctgcccaggcttggcttcctgggagaattggctcggcaacagcagcctgggccaggccacaaggcttcttgggcaaaactccgtgggcagggccaggggctggggcctcatatgcactgcctgtgcaccaggcgagtctgtgggcaaatgagctccagcttgccatggtgctgggggagggccacccttctgctaggtaaacatgggtgttcaggcctgcctaggcacggccctgggttctttcggttaaaggtgcaggacagcattttgtcgagccgggagttgccagtgagagggtgacagagagggacacatgggaaccttcaccaaccttccctgggactcggcccctacaggctttaagcagaggctgcaaggaggcttaggggtccctgggccaggactactgttccgactctgagatcttttatctgctgcaatgctggctgctttctgggacttggggaaggtgggtgggctgtgagcaggtgcgtttcctaagccaggtctgagaccagagcttccatttagcggtccccactgcaaatgcatttcagtccttgctcccccaggcaaagctcacatccttgggaacatccttcctgcaccaggcatggtactttggggtctggagactgtcgcagcacccctctgaagtgggtggtattatcccattttgcagaggaggaagctggagttcagagtgctgaacttgttcagcctccacagctgctcagggaatcaggtcttctactccctacgtgaggccacagcttgatttttcttttctggtccgtggctgtttgtacaaacgagtatcctgtggacatggttgtctgcccctgcccctccgacaggacagcgctgagcaggtacctgggctggtgccacacttggggaggtggacacgtagcctcagagcccgaagcaactggtggggttcattcccatggaggagaggttctccgtggtccacggccggagcctccgcatgtcagatccttctccccacccagatggagccaagtgggccccacatcagtgaaggaaaaagcccttggctcttgtgcaaacacaaattgtggaagagtggcatcaacaacacgaggtgctccccatccatccggctcactttccttctatgagatgaactcagctcagggtgttttgtgccttctccggtttgctctagtttggttttggtctggtacaattgaagtctttgcctccttccgacagaagcactggacccctctccctgggccctgaaaacccggaggggtactgggactgctgtgttggatcagaggagtcaggtagaaattgggggttctgggtgcagggagcacttgaggtgcctgctgcatgctccctgaagacaaaatcccagggaggatgtgtcagttccgagggccactgagatcaccacctccgtgagcatgagcaagaccctattggccgcacctgggacagccttcctgggcagggccagtcctaccacctcctttgtccctctcccactccccagacccccaccccctacccctcaggccacctgctccctttttacccaggcacatgtccatgtgtgcccttacaagctcctggctttcggaagggaggggacaggttgtagagagacgggatgcgccggagtgtaattttatttctgtggctctcctttcaagctgtcacggtaaatctattttacttgtcactttgtaaatcattatgcaggattaagccttttaccagcttttaaggcttctgcaaccagggacaaccccacctctccctcatcctgccttctttccctcacctcccttctgaatgaccctactgctgtgtcttaaggctcagttagaatgtaagtggggacccaggagacagcttgctgtcattgagtttagctgccccattttacaggtgggaaaacaatccctggagagggagggactcccaggtgcagtgcctggggtgcttagtgttttgtggtgcccctgagcagtggggagggaagttgctgaaagcaaccgagcctgggcatgggacttggagggttttttttctcatcccccatggggacctggaggccccctgtggctgtggcaagattgctcaagacccacaaggagaccccgtttggaagaggagacatacttggagggagagaaggaccttctgccccctctcagggtgtggggctggtggggtaggggactggtgacaggaagctggaggtgggaatgtggtcacagtcaccctactggcatgtgggatcccgtttatttatttctccagaaatctgtgtccttctccagagaaggctttgaggtgcaagaacaatgaagccatgtgctgagatgttgagagttgcagatagtggctgggactactaggccaagagccagcagtgtgcagcggtgcgtttcctttcacgggtccatctggagcagcctgctcacaaaaccagagtgaaaagatgctcacccacaaggctgatgtgcattgtgggagctgaggtttggggggtgcccactttgagaagccagggatgtatgtgcccagggccagactgcccagctgggccatgccgggtttgacagccttaggtcttgctgccttttccatcgggatacactggcctcatcgccaggtcaagggcttcctccctattgctggggttccagggctgtcctctgcccgtctgtgccaatagagggccccgccttggggggcccacactcacctgtcctgcttccaccactccccacctagacctctgctgtcttgagcccagatgaattaatctcttgcagcaatttcagtctaccaagagaccttctccagcatcttctaggggagggtcctgtgctttggggaagctggactgggtgacattcatttccacagccctctttgctttccctgttcaagccaccatgatgtgcaatggcagctgccttttttttttaacttaaaattttaaaattttgtgagtacataagtaggtatatgtatttatgtgggcaactgcctatttattggcctatttctagactcgagctgttctgcaaagccagagccttgtctcttatcccctagcacgggggccataacggcacaggctaaggcaatatttctccattagaaggatggccaaacaagagtcctcagaccctgacctcaaggagtttcacagtctgcattggaaacaaccttggctactcagcagaatagctgcaatgagtactgaaagcttcagagaaatcggctaataagttccaaggagtgagatgagaatgagctagagtggtcggtggggaggggcctcctggaggagggggcatttaagggctgcactgaggatggagaggctttagctagaacaaggcaaggagcgggaggaaaggtacttctgggcggtggaaccggcatgaccaaaggaagggaggtgtgcctgtgggggtgctggggcagctcagccagcacccatggactttaggggaagaacagaggccaagtttctagggatggctgggaccccagaaggaagccagggttaggagggaacacttattctagaagtggggagggagaggtgtgtgacagactgggtgaggacagagcagtgttttaggagatttagtgacagggagccacctgggttggaggagacctgagcctattaattaggcaggtgagtggagtccctgaggtgtacttcaggaccaaccaggctccctgtactgggtgggatggggcagggcttaggggctggtgctgttcccaccagccccgctccatgctgagtgggagaggaggtggcagcagcagctggggcttctgaagatctgggtgcaggcttggtctggctactcctgtgcctctgtcctcaacctgcaaaatggggagattctgcaactccacccagcctgtctgcctgctgctgtgaggagtgctggagacacagggaggggaagttctttgtgaactgacattgcctgttctcatccccttctggaaaactggtggctgccatggcatggccatttcatggctgctggcttccctctgttctccagattgggggtgaccctaggacctgggtttcattaccaacaagccatgtgatcttgggtcagtcacctccctcttccaggccttggcgttctcctccataaatggatccgtgctgataacctaagcctcgctgcacgcagtgtggctgttgttgtgctaggagacccaggcttgggctgcggctaggggtgtccccctgtgggcagagccccatacctgttgtcacagtagcatcgcaacacctccttataagccttggaacctcggccaagaggtttctgtgtacgcttcttggtctctggtgacttctaggcccatttgacatttctttgcacttcctgcccactcctggaggcccctgattagtctacttggttacaaacccatatcagatccctgatatctcccagcaagccttgcacaaggcatgtgcctttaagtgatgctcgtggctctttgaaatctggacaccagctggcagaggggtggtcaggtagctcgcttttctgtaagatgggtgtattttgttttttttcttttggaacagattttgattttctgataatagagcccttgagatagtgaggagacagtaccggaagcagcacccccaaagccgtttgaatacaatgcaagcagttgaggggctgagctaccagccagtaggagagagggtcctgggggttcaaagagcagtgggggaaactgaggtacagagagtacccagcaagagaatgaatgagtggcaggtccaagcttcagataattattattctttctaccaccccccccacccccaacacacacacacacacacacacacacacacacacacatattcaggggatgctttaggttctctgcactgtgccatgcagtttatgtgcattatctcatttactgttctgaagaaccctacgcgggaaggactgctgtaccccagttttattttatttatttatttatttatttatttatttatttatttatttatttatttattttgagacagagtctcactctgttgcccaggctggagtgcagtagcgtgatctcagctcactgcaatcctgcctcctgggttcaagcgattctccggcctcagcctcccgagtaactgggattacaggcgcctgccaccatgcctggctaatttttgtatttttagtagagatggggtttcaccatgttggccaggctggtcttgaactcctgacctcaagtgatccacccactttggcctcccaaagtgctaggatgagaggtgtgagccaccacgcctggcctgtatcccagttttacacacatgcgtacgtgatgtgctcagagtgattagggccacagagccagaaggcgttttaggcaggatttgaatgcaggcctgtgagtttagatcctggctcccactaccctatgcacaccctcccatgcccttgcgtgcctcttcagggcctctctctgggccatccctgccgcaagcactctgcagacagacagtcttcctctttctaggaggtgtgggtgcagaggactttgtgtattggggagataaaagagcccgtttgggatgatttttatcagctcgagcaagtcggtttgacttacaggaagaagccaatttgcattttgggaaagagctgagtgtaaaggccgcagtgagcactgggtggatttataaataaacagtcgaccgagggcattgtatgtccccagctgtacaatgctgggttcatattgacaccacagacctgttccacacgtcacagctgccctttggacagaaagggcctaattgagtaagagagcgctgctgctggaaatgccaaggaacccttcctccgacctggcttcctcggcacaagcgagccgggtgagtccggctgcagccgggcctgtttaccgaggctgctggcattgcatgccaggtgcagagcccacgggcgactcagaaggccacgaacgctggggccaaggcggcctctgctctccctgcaacccggagggagctggagccagagccagatctcaggaaactggggtcattgcatagaggctgccagacagtctgcagagctcagcggcctgggttcaaaccttctcgcacactgccactgtcggttactttggctttctagagccagattccttggccatgaaatgggtactgcttacttcccaggttattttgagaatgaagtgagatgaagtcaacagtagatgtatctgtccgttgtccctgccctgctgtgggatgacagagtgattttggacaagaccaaggcctcgctgggcatcactgtcttcttcagaaagcaatggggctaggccaggtgcacagtggctcacgcctctaatccctgcactttgggaggccaaggtgagcggatcgcttgagctcaggagttcgagactagcctgggcaacacagtgaaaccctgtctttaccagaaatacaaaaactagctgagcatggtggtgtgcacctttagtcccagctactggggaggctgagatgagaagattgcttgagcccaggaggtcgaggctgtagtgagccacagttgcgccactgcagtccagcctgtgtgacagagcaagaccctgcccctcctggaaaaaaaaaaaaaaagagagagagagaaagcaagcaagcagtggcgctggatgctgatcagaggcctggggcccttggaccagagagggctgtccctgcccagctggctacaggagctctgactctcagaccagcctaggttcatatcctgtgtcttccacttgtgggaccttgggcatttgacttcctctcaggacctcagttttcatgggtagaaagtgggaacgattaaggttgttggaaagacaaaatatgctcatgtacacttagtgctcagcatagggctggccacatggtgaatgctcataaatcagtcatgtctataacatacatttcaagggaaaaacatctgttttgagggcagaacgctatcaagtcaaatattttcctgatttaatttcaatagtactgttataaaaaacaataaccatgataccgatagttagaagaccgccccttccaggcccacttctttacccctttgctttttggcaataacccttgtgcagagccaaccccattctcctgacctaaccagttctcacctggccatgcggcctttccgggtgtcaggcaggtctctccggttaggtaagggaggcctcatccttcttacctgactgctctgagtgcagatctatgctgcttcccatcttctccaggcgcctgatctattaccttgggcttggaacgcacctaacaaaggctaccatgaggaggcccctcggtacctgttcatctggacacatcgtgcagacccccgcaccccgtgtggctcccggttaatcttcagggtgcaatcaatttcttcctcagaggccagacttcattgttctaagcctttctcagatccacatcttggggctgctggggtccctgcatctgtgtcctggtggtcagtttgaagcaccagcagacagcagcgctaaaggcaccttgtgtgtactacgtgtggccatctagggatgtctcctctgttgctgaacctgcagatccccgtgaggcaggtggggccacaggcctctcccctctgttttataggggaggtaattgagcagaacttaggacagttacatgctttgcttcagttgcggggctgggatttggacctggctcctggcctgacacaggtcctcagcttccaccagccttgctgcctctgaaggttgctggagaaaggaagctgaatgtagagggtgggtctggaggagagggggaggagatgagcccagaaggacaaatgtttgcacaaggagttagaaatgagatgtctaggctgggcacggtggctcacgcctgtaataccagcactttgggaggccgagacaggcggatcacaaggtcaggagatcgagaccatcctggctaacacggtgaaaccctgtctctactaaaaaatacaaaaaaattagccaggtgtggtggtgggcacctgtggtcccagctactagggaggctgaggcaggagaatggcgtgaacccgggaggcggagcttgcagtgagccgagattgcgccactgcactccagcctgggcgacagagtgagactccgtctcaaaagaaaagaaaagaaaagaaaagaaatgagacggcttcaaagaacctccagcacgtggaggtgaggggtgggaagggctctgaaaccattggccgttttcttgagtgcttcttgacccgaaacgctgccttgaggggttgatagagactggctccttcagtcaatgcctgctttcagacctggatgtgggggcctgctgggtgccagccccctgctaggctctgggaataggacaatggccagaacagataagatccctgtctgctgggagccaaagagagaaaccaggtaaacaagacaatcacaatcaaggacacctttataaattatgataagcaccaagaaagaaacaaacagggtgctgaatagaaaaccacccagaggtgagtgtgggggccttgagacaggaaggcctttctgaggagggccgtgagatgatggggtgggaaaagagagcacacaggcagaggaaacagcgtgtgcaaaggctagagacagagaggggtcccatgtggctcggggatgaccggcaggggcagagcagctgaaacacggtgggcaccatgcatatcttccagctccacttgcccccgggtcgccagcagtgctgccagcctgctgtgggcatgggctcaggtgtggacatgcctgtatctgctggggggtcccacatggtgctggctccctgcctcagccaagaggcacatgacacatgacatcactggctatttctgcctcccaccggccacctccatctttgcagcatgaagggaggcctggcctgagcccttaactggtcccctggcttggctgtctgccactgaatatcacctgctatttcagtgaccatcctgctgtcatagagggcagaggaggctgaggggtgcaagggctgtcaccaggggtccccggacaagcccaggttcttccgcctagggtcagccctggccctgcaacctttgtttatttactttgggccttgctcaaaactagtagcaagctgcctggaatgcaatgtgacgaactcgagataataataaaatcaattggactgtttccccagtaattctagagactgatgcatcattaatgttggtaatacagtgcctgtcagatcacaaacttctcaataaatgtgcagctggcaagctctgatagaaattggaggcaagcagagaatgagatttggggcctttgatatatggggtgtcagtggcgcagtgaagtttttatcaatttctgtcactttgggcttttgtgctcacagcatatgtggtcttcatggcacctctctgtgggctgcttggatgctaactgcacccccccacccaacagtgtgaggaagaggagttcctggagaggcctcagcagcactggtgcccttctgtgcagcttcattaccaggggcttctcaggcagacgtagacgggcaaagcctttggacttgactctgtggatcactcaggcactctccaagcattgattgagtccctgttggattcaagatgccactgggccctcggaggcctttggaggctctggaggacttgatggaagcctggggcttggggttgtggggaatggtcaaatgatcattcctacctaagggtcaggagaaaatggaagcagtgtgtgagctagcctggaagtgtcttgccaggtagactaggagaagagactattagactggggagctctgtgggcccaggccctgaagcatgatgaatcctggagtttatgcgggagtgaggactttggccaggccaggccccagcggcattggagagaaggcagaagctgcctggaggcagtgtagtgtggtggttagcacaagcactctggagctagacaggcaggctccgaatcctagctcccacacttagcagctgggcaacctcagggaagtgactcgaccgctctgtgcctcagtttcctcacctgtaaaatggaggtggtgatagttgaccacctatctcgaaggactctagcgagcataaatgaattaatacttgtatgagtgcctggtccattgcaagcacctgataagtaattggcattacttttgcataatgagctcagtgaacccaccagtcacctgaaagccatacagtgagattcagagagttgaagtggggcatccgcactcatacagccgcccagaagcagaactgagatttgagtgcaggtgatctcaaaacctgcgtctctaagctgctgctgaggctgcggttgagaagcgtgggccttgggtgcccaggtggaggaggtggcatgcggctgggggcccagcaccctaccgaggacaggcctgtgaggtcaccgtcattagcaaggagattgggtgggcagtgagtcagctcaggcttcatttgtcagtagccctctggagctggagaacttctgagactggggacttgactgtggtgcagacgtctgcattggcccctggaggctggaagtggctttgagtagcagaggagccaaatgggaaccatgttggcggcagattccagaagtgagtcagaatttcaatgttcccagctcatctgcttgagagcaggtcctgagacccagcaaggcctgcaccccctcctcgacacccacccaccctagagcaccacagtgtctgcaaaccagagcggagggtccctaggctgtgggggtgacttgggtgtgcgcacattctgatgcagctatcactgtggtgcacctgctggggacccaccgtgaggccccgggagtcggtgtgctggtgctggataccagcgctccttgagagtgccctgggcacagggaccccatgctcccatgagcaggggtgctcctggcccttccccaggctgcctttgaaaaggtccttccccctccccatggctccacacaacaccaggatgtactcctggctggttctgcatctgtgtttgcctttaaaaaaggtgggttgcaaggccccccagggcctcaggaaagaagaagcaatcttgttagactggggtgtggaagacagaggggcctgtgctgcactgggaacagggagcggtggcctctgggcccaggtctgcccccatcccctccccggctcccttcaaacctccctgagcctccatgccctgcttgggacgtcccagtgtggagcccaagtccctgcacttgttgggtggtggaggatagctggtcctgcatttcccaggtgatgtgcctgggaagcatctctccataaaccccctgtgacttgggcttggaggaagtgtcccttcctgccagaggagcgggggctgggtgaagcattgagaggagctacaggtgcatttgaaaaagcaggtaggtcttctttttaccacctggaggtcctggttatgggggcaggtaggagcacggtgctgacatggtcctaaccggtgtggttcccatcactactgcttgtatgacccgaacaagtctccagccactctgaatgtcacttatcaccacagtgcaggtcctcatgcccacctgacctggggtgtaatggaccacacaccctgatgctcagagcacatctcttgttgaatgctaggccctggatgactggtcctggcccaaccccaggagtttagagcctcactagggaacaagactgggcatgtactacctgtagcatgaggggctggtggctgtgaacaagagccctgctgaggggagccccagggggacaggttcaggtcagcctactaggggagggcattcaaggagggcctcccagaggaggtggcctttgtgcttcagcccaaaggatgagttggggaatgctcagcagaaagaggcaggtgagggctgggcatggtggcttatgcctgtaatccagcactttgggaggtcaaggtgggagaattgctagagcccaggaattcaagaacatcctgggcaacatagacaccatctctgaaaaaaaaaaaaaaaaaagagggcaggtgaggttatcaggcctgggtgggtgggaggcaaagcctgggagctcagtgggggcctgatcacatcccagagggccttgaatgccgaatggagtttatccttgactcagggtcaacaaggaaacattgtggggtgaagagtgctgtcctcagatctgatttgcagaccagtagctgcagtggctgcttggaggatgttctcacaggggtcccatgatccctgctgcgttccaggagagagggcatgaggctcattgctggcaggggcctgggtatgggccaaacagtgctgcagatatcatgtggctggtagggggtgaggatggtggtcatcgggggcactgggtgctgtggtatctgaagggagtgatttccaagtgccgtgagggtgcccttggccctcagggcttttgcacacagcatccctgggtgcctgctaaacgtgcagatgctgttctcaccccagcacagctgggccaggtgcatttagaaacctggctgaaaactgcaggtctgatgaggagcacaaaggtcgggtccctagagaacaggagcctttgaaggaagagggtggagctgattgcagactgccgaatcttgaaggggtccacagaggggctgcagggtgtggacttggctgcagcaaggagagaggaggaccaagctctccccttgatgagtaattcagcatacagttgaagctctttgcagtaggtgtgaggaaggcaagatcttggcactggggatgctactgattgtctaatggaaggggttctcagcacaggcaaagggctgagctcactgtgctggtgaagggggcaactgagtaagtcctctaggatgagggggaagttcccagtctggaagtgagggaaaaacatctgaggcagagggaacagcatatgcaaaggctcagagtgctggggggatgctgtcagaggggcacagctcttgaagccaggccagcagggatggactttgttcctgtctaggggcagcaagtcagccaggctttcttctctcaagtcagagaagaaaggccagggctactggatcctggaatgtgtgaggtccttggcccagtggatgtctggtggccttggtgtatcttattggcacggccacgttcacaggacccgtggggtcaggggagggcctacttgtgcagagggaggggtagtctctaggtaggcaactggcacctgcctccatctgggtgaaccagggcagggagggagggaggcgggtggccaggtgacggccgtcctggcaggtgcgttccatcatctgccatgaagacagccgtggggcctcaggggctggagctgtttctcacactgtccccgaccataaacacacacactgagattccaccgttgtccctcccctctctgaggatgtgatgtgaggagcagctgtcaattaccatcagctgccacaatgcagggaggcagctgaggaccagatagagcaggagtggccagctccaggtcacacggcaagtgggacctccgaccagctcccagcctccccatggcaccagggacctcacgtgggtcaggatctctccaccttctctgtaactctggctcctgctctcaaggaggaagagctgtcccctagcaataagctcttcccatctggagtcaccagcttgttcagcttttcctcacctccctccacctacaaacaacccaagggaacaaacccagaaagccaggtcccagcctgttggaccaggcctcgcccagttggagcagaaggcgtgcagtggggaacgcagcctgtagcccctctcacagggaggcagaaatcccggctctggaagtgtataaacacggttatttttagccttcagagggctgtgggcgcagcagcgtgacctgaatctggctcagccccctccttctgccccacccgggagagaaggcctcctttgccccgccctctgctccatcagcctcagggctgggccagtgaattccaggatccagggagagaaagaaatgggtgtgtgtgggggtctcagcaaggctgcccagggccaggagctgaggggggacaggatgtggttttcaaagaggcagcatttcaagttgcaacagaaatattggagccacccaatttcatgacttttccatgggttcttactccctaatcctggtcccttccctggtctggctggaggcgagtcccaggcgccacctgggaagcagtgctggcctagcaccaggcggccttgctgctgctttgctgccgtaggctaccaggcccacatagcacctctccgcggctcagtgccctcatctgagaagtgggatcattcccaacctggctggcagggagttgagggggtgatggtgagctgacagaatcgtagctgttcactcacttgttcattcaaccaacacttattaaatgttagttttatgccagccagtgatctaaacattggatagaaagcaggaaaccagcttgaggaggtgctgaccctcctggggctaacatcattgagcagggctggggaacacagaaggacagtaatcagctcgtagtacgtgcagtacagtagtaatgtcgagcgatgtgttacggagcggctggggtgggggaggcggcatgtattttagatgagggcagtctgggaggaccccttgagaaactgtaaaacagccagccactgtaggtggaggaggtggtgagcgggaacagcaggtgcaaaggcccaggggtaggaatatgcttggtgcccgagaactgaggacatggggaaaccgtgagggggagcgagcagagccagctgcacggggctcgagggccgtggggatgcctggggtggggggctgtaaacaggaaaagctttacagctgtaaggaagagcaggaaggaagtgagagtgggaggccaaggaggggctgttgcccccacccaggcaaaggagctggcgaggagtgggcagatccgcacgcggggagggtgaacggtggaaatggcagatggcttggttgagggggagcgtcagaaaccaggatggttccttgacttttggatttgatgcctgggtgggtgggggtggagagggcatttgatccaaaaggagggcggagggagaacaggatctaggggagggagggcaaggggtgatgccaacctggacacaggttttcggtgtctgttgacatcggagtggagaggggagccctgggggagcagctgcatggggcacaccaggccccaggctggcaagccctcctccctggggctctttgccagcccggagccaggctgtgtgggcgagtgcttccctgggggcctggcctggggttttgtcccattgcatcatggatgaggaccttccggtcccctggcttggaggcagacgtaggtggaggtgcagagtggtccacggctctgcccaaaaggctggacaagttggaaggtggtctgtcattcaagcaccatttgccattggctggatgcgagccctggtgtcactaccaaccttgttcccagctgggctgacttcttactatgaactagcaactatgaactagtcctgccactcctgtgcctggactgggatgggaaggacagcaggagtagcaacatgctctggaatttttcacagcagacctggttcactttcatctggtcaccagacaatgtagtgacccctcccctctctgggcctcagaatcccacctgagaccccaggatggagtagaaggtcttcagggtctccgtgtgaaacacagcctttcgatgacggagatttggtattgagagggtcatggcgtgagtaaaggcctggaggctggtctagggagtcaccttgcaggatcttggggagcggatgagtatagagtccgcgtgcatagaagccatgtgcagggtggtcactggaggtgaggtgggaacaccaggctgcctggttgggtcagagggaccagattaccatataagccattgtgctctcaggataatctcctggcttgttaaagcctcagttttgtcatctgcaaaatgggtacaatagacgtcactgagcttgcaggggtgaatacccaccaaggtacagagatgggccaactcagtgcctggtcgtaggatgtctttgatttccagaggttgccttctttccctgtctttctccagtttgtagccagaatccaaatttcaggggagggctcttttgctgttggggcttcctgtgagagccacagccctgggcctgggagtcctgccaaacccaactctggaggccgtgaacctcaccgtagccttggggactggcccgctggccacggcactctgagcatcagccttaggtactgctagtaggaggtgcactggggttttaaccagaggcagtaatgagctttctgaaatcatgccagcttcatgttttgtttctcaaagaaacgatgggccttgatttcctatcagcattgatgtggttgctgttgttgttgggttgttgttgtggggtgtgtgtgtgtgtgtgtgtgtgtgtgtgtgtgtgtgtgtgtgtcttaactgccatgggttttaaagccatggtggaaagtgaggaaaatagcagatgctagatccaattgccaccaaactgtcttgaaatgctataaatattttctaaaaagactagcttcccgagcccaatgtgttagttgtctcctccctgagaaactgattcccgaaaatttagacaaataacctcttaaatcacagctgttaacctcgggtgtaaaaactgctaccacaccagccgcaggtcacagcgactctgctctgcctaagtgcctccgtgtggcatagagaaggtggtggcagagaagagagatcttgtgcttaggcaagagaccagggtcggaagccgggcttggccactgactgctgtgtgacctggggccattggcccacctctctgagcctcttctgtgtaacagacctgttacaggctgcctcgatcctgagagtgccactgaactgagcttctttctgctcctcaaaggtaaacaaaagtgaccgttggcattcaggagttcatgttaatcaggactgagaaaacccctccgcccctagtcccctttagccctctgactgtgtcaaggacagctgccagtgactggatacttgctggtgtctcttttcaacagagagcacctgcaggacccggagcctccagcaggcaggcagcaaaacagtgccattgtttgttctccttgtatttgtttttgtgtttaacttctatccttggtgagtaaggctaattttgtatttaaggtagtaatataaagttcttttaaaaataaaagtatttatgcaaaagttgtgaattgattattaagctaatggcagtttcgatggcagaaggaaatgacaaacatcaggaagatgggaggaaatgtgacggactctgcacactgtccaggttgcccttcccctaagtgctcaccaacttctgtgcccttgtagaaggaatgagtggggaggggttgctggagggacgttctggtaaattgtcttccaattgcacaatacccagaggtgaccaccacactccctaagacggtggggctacagaaagccccattctggcatccgggccaaggaaaccactctcgtggagagtcttggccaagaagctgggattctgtagcaaaaccaaatccccccacccccaggccctctgtgcctctccattgaagttcccaaactgagggtctaagcttgacaccatctggctgctctctcctaggccagagaccaagaccaggccctagctctcccagatgtggctgaacccagcagaatgtagtagttgctccactaacagggacatcaagtgctgtaggttttgtcttatgctctgcctgagagtgacagcctggagtgctatacagaatagcaattctgaggctacaaggagctctgtaagagagcgtggggaccaattggtaatgcctgccatgggtgtgggaaggaagcctgggggtacacaggcctttatttgtgactcatatgctcccccaagcctgtggctagatcctgcccccattgcatcgccagcacccagcttggcgatcagtgggtgattgagcccagaagctcctataagaacttagcagatgctccttggccggtctttgcccgttgtgcaaggggacatcccccaaccacattgcaggccctggagggtcaacactcagcccttgagtttaggaagctcttgttcattccatacccactccctgctagggctggatatggggtaggtacccaggaagtgtgttgatgagacccaagaatgatcgacaaatgggactggagaggtggttcggcctggcttggcggcagtccatgtaacactacctcactacaggcatcgtgcaggtggccgagtgccccagattttctaggacagccctggtttcagatccttcatctattgttcttgagtgcccctgcctgaacaggcatttgggctccgctttggaagtcctggctgctgtggatatagccctcatgatcatgctttttgatcattttcagagcactcactcttccattgcctttgcatctggccaggggatggagcagccccatttgctcacttttttcaggtgaggaaattgaaggccagagtgagcaagtgactggcttgcggccacacagccagttaatgcagacatctggcctgaacctgtgatacccatcttctggccacttcactgtccacttacaaagcccagaactttctgcatcctgctatttaagcctcattcattcagtcagcttttgtagcctagcgggttagacctcaggagtcaaacagcatgctttgcatttgaactacttctggccgtgtgacttttggtgagttcctttctctctctgtgcctcagtttcttcattgataaaaggggtgtagacaccacacggggctcttgtgagtattactgggttaacagtgtctgtctcagggtgagggttctgtggggcccgccagtggtgttcacagaggtggattgatcagagttgctcacagtctggtgaatgtgaggtgggaggcagatgtgttcaccacgaaagagcgttcaagtggatgggtgaggtcagaggtgcactgggcaccaccgggcggtgggaggagggaccgtctccattgctcccacactactcggaggcattcagaaaggctcctccgttgatggacgctacttggagcagggcttgcagggggcagggagggcactggcctgatcctggcagatagcaacctccaaaacttctctggacagaggatggcactcatgcctaccgcctcactacctccagcagctggagcttctgggctctgctgtagggtggaggtggggttgagaagaggtgaaaagacccagttgctttgtcccaggggcaggcacagagtcctgcctgagggccctggcatggggtaattgtctattgttcatcgtctggtaagccagctccccaccttctttctgcctgcctgcctttctgtccttcctctcagcatctgtctatgcaatataaagagcccctcccaacacagtcaccagtgatctgcttccaggctagtgttgacatcccagcccacccggagacccatttattctgccactggggcacagggcccagttttaatcatcctcgctccactgtgagatacagatggttgtattattaatagtcataattaatcagcatccacagaggagcttttccctaggcagcagatcctcaggacgagcagccctgggaggtcccattccagtccccctttacagacaggggaagtgaggctgggagaaggggtggtgggactcatccgaggtggagctaggtatggaccccagctcagatctcagatctgataaccacctgcagtgttactgtctgggaatggactgttcaccccacccacccatacctaggtcctagggtgccaattgctgggagaagctttcagcactggggatgggagggtggtgctcaggctgatggtgcactttgagatctcaggctgagagtgaaggaagaaaggtgggatggggaagaaaggcctgagggaggccggacatattgggctagcaggacagggggcctgattggggtaagggtggggaggtggccttgggtagaaggaaagccaaataccaaccatcaccccctaatacacacagatcgtgggtcagggcctgaggttggctgcttctctgttctaagctctgcatcccagggacagtgatataaatgcttacagcaggcagcatcctgatttatggggctgttttggacgggcctaactacatcagcacagaggcagtgaggggcttcttgcacaattctgcaagcccaccttctcccctgcctggctcctggggctgaccaccaccgaggcccctgtgcatgcatgtgcacatgcatgcacccagacccacgcctgagtgggcacacccaggcccacgtgctctgtgtgcacctgaggctgtccacatccctgcccacagcccataaactgtgttagcccagcacgcaggtgtgtgctgctttgggcctgtgcgcagatgaacacaggtgtgcccaggtgcacacatgtgtgtgtctgcctgcactctgcaggcatccatgtgcctatgtcctctgggctgcctctctctgtgttgatctgttcgtggctctgggaggtggatgtctgttcgctgtcctgtgtgtgtcccagtgtggatgtgcattggtgaggggtgtacatgcctctgtgcaagtgcgcctgtgtgcatgggtctgtgtgcacacatgtgtgggcatgcaactgccgcctcatcctgtctttttcattatgggtgttgtccacactcacatccttgcgtgcaacacacacccggtgcccagcgtggctgggctgcccccgcctgatcattaggctcatggataagactctctgtcatcgtaaatgagtatagagtgccccagtccaggagtcctgaaggaactggggaggtagcctcatctgtcctcagcatctccaccccacctccatatggatggtgctggagaggggaggctgggagggagggatgtggtgcccactcccaggcccccacactgggttcctgatccaccctttgtttctccccaccatgcctatgcactcgcccatattctgtgccagaccttgaggacagccccgggtcgtgggagaagcccagtcaagagtcaggcagccgggtgcacaaacccaggctctgttgccagcatgtggccctagacagcccctctgcctctcccatcatcactgttttcccacctgcaaaatggtcttagcaatggccacctcatggggttattgtgaggacaaaaggggtgcagaaactgctagagaagtcaagttccttcccccagcagacctcagtctccccatctgtaagatggcaataatgaccctcaccagtggtctcatggagtgttttgaaggtcagatgagaaaaaggttcagtgaaggctgcagggtggtacccataggacttgttccagctgtgagcaaaggagatgaggggtgctaggcacttgggggtggcatgcatggcctgggccagatgcctgcatccaaacccccatgctgccaccctctggccttgggatgtgggaaggttacttcatcctcatctgcatctctattatccttagattcctcatctttccagcaggcatgttcgtagtagtatccatctcctggcatgttgggagaattcaggagaaatgagtgtggagcttagcacagagcttgacacaaagcagctgctcaaatcagcggtatttgttattcttgtttttggccttattgcgataccggtggccactcggtctggaaggacaggtgaatgcatggcggatggtgcattaataccacactaggatacctattaatgaggtttaatctgtgtttccagacttgatgtccatccgtcccaccgaagaagagttcaagcttttcttccagggaactgagagggccatgctgaaactggaagcctcagcctgcaagaggtgccctggggaaggaggtagttggtactgatgttggccgactacaaaggagctggctcctgggactctgaatgctgtgccctctgcagccacccagccccacaatgggaagccagtggttacatttacccctgtctcttctgaaccatatggtggctgcaccacagctggctcagaggctctgaaagaaggcccacaggggaacatgatgtcttgcctgagccaggtgaggactgaggcccccactgccaagcactgcagtctggggcttccattttcaccatagttcctctaagctgcctggaggaagggcttgaactcatgaacttcatgaccaatggacctgaagtctggaagcacagatgatacctcattaacaggtatcccagtgtgatatcaatacatcatctgtcatgcactcacctgtgcttccagatggggtggccactggcaccgagggactccttgcacagttatgcagatggctgccaatctacttgctccccttgcccagctcctgggctgaccaccaccggggcccctgtgcatagagcccatgagcagtccccatcacctgtgggcttcccagtctgtgcccaacttaatgatagctgttagggtccagtagaggatgcaatgtccccatcctagcaggggctttactgaagaaacgaggccctggcacccaggccagggcagggaggagacagttggtagacacagccgggtctgcaggggctcggaggtcatggggcccaggtgggcaggcaagggaggaggcaggccaggctggagccagtccttgaaggacaaagaggatttagctcactggaagggatggcattccagaaggacagaagtgtgtgggcaaaagtttggaatcattcccggggaaaggtgtaccctctcccataagaagtttggcctgccctggaccaaagagcagagtctttgctctcgatggctagtggctgtggggtgaagcagatggccagggggtgtgggtgacgggggaggcgcaccctcaggcctgagccaagggaaaccaagtgggcccacacaggccagagcctgagaccttggcaccagctactcggagatcttgactcaagagttaatgattcatttgtggccaattttctgctggctttgcctggaaattcccaagcttgccccttccctcaccttagggagctccaagaatacagtctcacttacacttggctgagaacgtctcacccactatccagggaatggtttttaaaattacagcaggtgtgatgtaggttagccattaggaaaagctgatcgggggctataggctgggagctggggtggtttgtttgagtgtttggaacaaatgtgaatagaattcagtctagtgtaaagtgttgtgacagttacaaattgggagctacagcttgacccagagtaggacttggttgggctaaaaaagtaatggcataggcaaaggccctggggcatgaacatccagggaacgctgagtgattgtggtgtggctggagtgtagagggtgtgagagacttctagaagtgtggacacaactcccaagtgaaggactctcaggacttgaagatttggcagtgggacgtgctggcagtggggagtcagggctggtacctgagtaggggacaggtgtgtttgatttgggttgtagggtcgcttgcccatccctgtcttgattctgctggtcagcagaccttccttgacagcctgctctgtgccaggtcggacccacgctctgcacgggtcctgcacctgtgtggaggctgaactaaagggagggggttacatgtagcaattcaggtgggagcatgggtgtgtgcaggagcaggggaatggctgatgacttcagacccactcggctccatcaccgaaagtccttgggtgagcgtagcagaggtgttggggtaggcttcaggaaccccatgttcctggcaggctctgtggacacgccgcctggaaaccacttctgccctgtaatatcagcatggctgaaggggcctggaatgtgtatctgtccttgtacagaggaggggagcagacgaggcccagagaggggaaggttgatggcagagcccaggcagaactcagggcccagtctcccaatcctggctgattgcacatatatcccaccacccacccgttcctgcagatctaaggacatttccccgaaaccaggcaaaatagagcagcctgattgtccatgtcaaaatgtctgggcatttggggagggagggttcctttatatctttcacaacttagcaaatttaatttcttctgattatttcttgacggtcccaggcgttggtggtaaacaaccacactccccagaatgtttccctgtgacagcagctttctctggcgagggtgctatcaacacttggcagggcctcctcctggctcctggctcccagctcctgagatcgtgagctcctgagctcctgggctcttgagcaaggcagcaagtgagggcttctcaacagctttcagcatgcagagcttgccctgtgtaccagggcaaggacaggcctagcctctttgttccccgcagcagcctggcctgccttcggagcctcaggtggcctctggttgtggatggtccccatgcagcgaggctgggtggtatcagatgtctgctggctcccacagctctggtgccgaggtccttggcatggctcagtggcaggagggagcctgtcttctgagcagctctgccaggactgtctgtggccgagagaccggcagcatcctgggcctgcagcctccatggtctgcgtcatactggcttaggtgtcctgagtcagagccaggaaatggatctgccatgcgggggtggaggtgctgctgcccgggcagctagggtgaaccccaacctcctgcccgtccacacctggagggtcctggccttgtgcttccttcccctggcctggcctgaatgtgactggtgcctggaggagaggctgaagttccagcctgctccacactccactttatgtgcccaggcccccaccccacaggctgttgttggcagggtgggtgctgagacacaggcaccacgctatgctgtgcttttgcctgagttattctattccctttttctagaatgccctttccaactcgttgtctgtgtgattttctgctccccctccaagaatttacacaagaatgacttttttggtgaaggcttccctggcacccccactctggccaaggctgcccccctttcctctgagccccctctccattgatggctcctatcacagtgtagtatattcacgtttggagcccgttcacctgtgtaggtgccttgaggcttttttctttgtgggtcctacaggcctgatgtgtagtatcagctcaataaaagcaggctggatttaattaagggggttcctgaaggcggtgctggagtctccctttgttaatggtgtggtgaagaggaggcgggagtttgcaaatggagagaggctgacttgcctgccggactcctacccccgatcccctctgagggcagtgctgcccctctgactgctggggactggggtggccccctccatttctatccagcggcagacttccctgcccggcaggagctggctccccaggttgccggagtgatcactctccagaaaacaccccagtggaaactgcatgaatgattgataagagctgagagctgtttaattttttccccctgtttaatggctatcaataatttaatacgctctctgtatgtttttaagaaatagcacccatttcgccgtctccggtttagcgggctaaatgatttaagtgttggaaatgtgctctgaggatggaggttgagtgagtcggagaaatctggaggctgggagtgggggaaggcgggttcagagccagccacagcatcttggcctgggtgtgtatgtgtgtgtgtgtctgtgtgtgtgtgtgtgcgtgtgtgtgtgcgtgtgtgtgtgtgtgtgtgtgtgtgtgtgtgtgtgtgtgaaggtgggagggagaagggagggagggaaggggcgggtaaaagccagctcctctctgctaagagcaagataattgcttttccggggcctcactgagcagcagctgaacagctgtcagcacccccctccacaaatgctaagctttttttctggatggctctggggggcccaggggggctaggaaggagctgccaccagtatcaccacgggctgagaatctccccttcccctgacatctttgccccctcttaaagcttctaaatcacttttattttaacgacgcagtaaggctgctgcccgggtggtgtcttccaggtggggtgtgggtggtggagtggagtgagggactcagagggacctggagggtcatctgccagtgctcccccaaactttccagatgcagagcatcacctgggaggacttgctaaaaatttaaatttctgggctgtgttccagacccatagacttccactcccaggggaaaggcctgggaagttgtgggtttaacaatcagcccaggtgattcttagcagaggagtttgggaactatagagtccagctctgttctggtgcttacagcacccacagcaccacgtggcagctcccttctgcttgcatgcctctgggaatgaggtactcaccacctcccaaggtagcagacccacttgtggaaggcatactctagtctagagttgcttctgatgttaggctgtgacctacccagctgcccttgtgggcttggagttctctctgctacaggacagaccgtgtttcctgggatctgatgtctttccctctcccagccttgccactttttggcttgtttgggcctctctgctgggtaaggagcttcctctcttagcaaagggtcctggaggtagaaggcaggaaggtgacaggtgctgtggcctgtctgtagtgtgtgaggtggctgcatcatcctattgctggtaagcatcatcgctggtacagtggagaccctgaggaaggcagaaagatggtgggcctcagcactgccttggcctgtcagggattccattcctcccacgagagagaaaactggctcatcagagatcgttgtgtcagccatagctcttagatgacactggggggaactgagggctgaggggtttccccagagaccacatatctatttaggacagagctggagctgcaaatgtgggggcgagaggcccttagaggggtggccaggccaaggccctggctttagggatcagctgaggccccagccagtcactcacctgaggttggatgggggagggcttccgccttctcagtcactcagggctgatggacaattcatggagtcaatacatggaaggattttggtggagccgatgcccactctgtctggcattacaactcttccttctgtctgcctagcagtttccattgttttgccagagggtgtagcattatactacggccatgggtcttgcaattttgttttaatagataattaagagggaaggagtggtgcacatttactgggcatcatggcttactgtgaaatggggagtataatccccccgtaagccctgcactctgtagccccttactgcacccccggattcagccccaccctccatctctgtgggagaagcctgggtccccaggagagaattgccctgttgggtgctggcagctgacctatcttgagatcccagttccccatcctaccctgaagcctgctctggccatcacagtatggctgggggtgtctcgaccctgggggaagaggagtaggggtgtcacccaaccctgatagagcttctgcttggagaactccgagagctgcagaggcagaagagagacttacacactctggggaagacccagccccagagagagaactgtgtgaatatggacacccaggcaaggcctggggaggtcagggagggcctccaggagaaggtgccacctgactgcaggcttgagcatggtaggaaggggaagggcatcctgcggtggaggtgtgatgcagcctgtgggggtgcacagaagagtgaggtagagcctgcagggctggggatgggctacagaggccggctggccagggcggggctgacctgattcagttgggtggaaagccacggaaagatttgtctttagttccattgaagtgttacacccatgcagaaaagtgtgtatctcctacatttgtagcttgacaaattatcctgaagggcacatgcttctgtagctgccaggcagatcaagaaacagaaccttgcagacccactagagccccctgtgccctctactcactgccccctcaaggataccgactgtcctgacttccagcctgctgtgagttatctcctgctgcccagcaaaccacctgaaaacttggtggcttaaagcagccaccatttatgaaacctcacaattctgtggtttggctggacttctcctcctgattcgcttgggctcatgtgactccagtcacgtttgagtgtctgctggactggaaggtccagatggcctcagtcacacgggcagtgggtgctggctgttgccaggggagttccccaccctccactaagacagacacctccctccatggcctgcagcctcacaagagaggcaaggccagaaatggcaggacctcttgaggaggcctagtctctataactcacaaaatgtcactcacaccgaatcctattgatctaaacaactctcaaggccagctctcagcaggtggagaacagactccgcctcttgataggaggaactccagaggacccctgccgtatttcatctattacaggtgtagagtctttttgcccttcttgacctttatataaatggatctcataagtgtattctctgtcgtgcctggctttttgagtcaacattgtgtttgcaagatttacccgtagtgttgttggatgaagttgcagatcactcattcccaagcctgtgcagcagtttgttgtgtggaaacaccagttgacccattctatggttggtggccatctgggaagttttcattttctggctgttacgaattgccttgctacgagcattctaacacatgtcttctggtgaacatatgcacatttttctgtggacatggagttcctgggtcatgggagaggtcacagggtaagagacccttccaaactattcttccaagtggtgggtctagtgtctagtgtgtgccccaccagcagaagggggactttacaaagacccagctgaagatgggctggaggtgcatcttgtggacactggaaggggcttcctgtgatgtcccctctgcccgccctgagcctcaggcccccaggtcaggggaagtagagccatgaggctgatccctcttttctgagcatgagctttcctgctacactttttccaccccagaggcctcctattgccttctccttttcccagcagctgcctttcatggttgacctgaccctcaacagtcagggaggccaggggtctgcagatgcaggaactggggggagacagccacacagcctccatccctgaggagatttggacttcactccagccttgcctttcaccatgggaggaaccctttccctctcagggcctcagtttcctcatttgtaaaatgacaaggaaaagtatcaacctcaccaagtccctttcttctcatcaatctgaccccatattctagaatcgaatagaggaagggatggggggaggcctcctgacttcagtcagcccatgtttttctgtttgttcactgcacactttcacggcaccattcatccatcaaggaatctctgtggtccttgttaaccagttcagaggacagagagaaactagacttcactcccaatgtccaggagctgggcctggagcgggagagtgtcctgtgggaagcgggaggaggcaaggttggccaggcgcacagcccactggagatgaacaagcaaggaggggctggtgagagagggctccacggaagcacttgagcagagtctcaaaggccaggggcccttgaaagacagagaagtggggagaagagctctgagcggggcacccagcgtgtgccaaggccggagccaggggctctgggaggccgggctgactggagcctagtggtgggcaggcaggtttggctgctgctgtggtctggctttcagggctgcggggctgctcggccggtgctggggcttcgaatgtgacgttcaggagctgcgacctttatttggcagtggcaggacggtatccagtgtctcgagtagctccacgttggtgggccagttccatcttccaggagatggcagccaggacctagaggtccatgacgtgggtgaggggctgcccgcagggtcagagcttggagctcactgccccctttcttgtctcccataggactcacggcagctgtgttctgatttcgtactactgctggggctgccacctcctcctccagacgctctcagcagacttgagtcctggtccttctgcagaggcctgagcaggtaagtgggatgggctggccctctggtgctgtgcacctgctgacgtggggcagacagggagtgcgggctgcccagagtgcatggtgctgtttcaggggcccagagggctggggaggggaaggggcttctttctcagtctttatttgttccttggccttttcctctcaaagaaagccacacagtggagggtggtgaatgtcctgacttgggacctggacatgggattttattctgctgccaactcccagtatcgccttgggtagccctttccttctagagggcctcagctttctactctagtccatggaaataacagtaatgatatcctctaacccgacaagcacttaactgtattctgggtactgtgcaaagtactatagagttattacttctttcagcatcacagcagccttatgagagcattgctgtaatcaccagcattgtacatgtgagaaaactgaacgtcactcactcaggaagtaacttgccccaggcggcacacctggctgagcctagggttcaagtccaggtctgtgtggctccagtgcgccagccactgcccgctggcctactctgcctctggccttgctcctagcttctttttgggggtggggatcagggcaattatgggtgtcttcagaagtgccagatcctgtcccaacttaagaaaaagggagaggggcttttaccaggtgacaggctcctggtgggtctggggtcatgacccatttgtgatgtgatgtggcagggaccaggcctggcctctgggtgcctctgaggtggcagccagggccccctctagaggaggggtgtgtaggctggataaggctttctttccctccgcccctcaagttcgttttcctaagcttgtattaaacacttactgtgtgccaactcctggattaggtaccaactgcggtgcaagggaaaggggcctgtcccactctctgctccgtggagaaacagaaagatcccagtgatgtggcaagccccataacagtggcgtggagagggttcagaggctggggggagaattctggggaggtgaccacaagtgagttacagtgtggggagacagaagcatagatggagcagaacctggcaggatgtgcatgcacacacagacatgagtggtggtgagtgcatagataatacagatgtgcaaatgtgcgcttcctcacaaacgtgtacacagacgtcgcttctgcatgccacatgaatgcacacagataacacttgcgtgcacttgcatgctcacatacacatgcacaaactcgtgttggaactacacacatacacgggcacaaactctcacaagcacacagcattctgacacacggggctgcatatccatgcacacacaacgcagggtgcattccaacaagaagaggcagttcagaggtcgatggctctgcatcggcaaaagcttccagcagctcctgggaggctctggacagcctgggccgaggctgagctggagctctgtttgtgtgtatgttggggagggtgttggggcttgagggccagccatgtgactgaccatggacaagcccttgcccgctctaggactcattccccatctggaaacaggaatcgtccctgtccgcctcctatacggtggccgcaaggatgagaggctgctgtgtagattgccgagagcaattttgggcactctgcagggcttcaacaaattgaagctagtagtctcatgagaataaaacaggttacaggtaaagtggggatgtgggggctgttcctctccaggcttctcatcccctggggcctgggtactctctgaatcatgggcatgacagtccaccctgcctgcctccaccaaggtggtggggtctgtgtcatccctgctcccgctctcccacctgcacttccctgttgactcgtgaggagttgggggcctgcagtgcccagctttggtacaacaaccacatttgactccctgccaggagactggcacattgcctccatgagtgctctaaatccccttgagaagcctgagaaggccttaccaagcaatttccagatgaggaaactgaggcacaataaatgcaggtgaggttctcagggacacctgctcataagtgttggagctgggcttcggatccacgtcatcagatgtgaacatttatgctcttttctcccatgatctcctctcagggataggtcatttattacccactttgcagataaggaaactgaggctcagagagggcaggccactcagccaggaagtagcacagccagaattgggtgcttattaaccacactgcacccacctcaattcaacacttccttttcctttccctccctccttcccagagagcccctccaggttagagggggttcccgaggaggcttctgggattatctgggctttagttctgacctagtattcccaggcatacctgccattttcttgcaaatagaaagataggctattctctggggtctgctttctagcatgacctagtaacttcctctccacaactcctttgtaaagtatccttaggattgtcctttggaaacttggccagcagaaagctctggggtacccaagaggcttggaggagtcctaggcctttggagaggtagccactgcttgcatatccactgggaggctctgtgacctgctaaaggatcagggtgtgggaccacagcacagggagccaaggttctgcttggcatgggtggtaggtaccactatggaaggaaattgggaaggatccccgggaggtgatatttacgctgggccttggaaagaggagaaatttgctaggttgatgtcaaaggccaaggaagacccagcagaaggctcagctccaccaaagtcccagaaaagtgagagtttattcatggcccttcgcacctgcatctgtacccaacaatacccatcagagtctcctagaattagggccagctaaataatttagctgtggtccaatgctaaatgaaaatgcagagccctttgttcatgaattacaaaggatttcaagatgatgacagcagagtagggtccttctaagcttgtggccctgtgtgacggccagtgaagccaaccctgcttgagtaagtgtagcaattgtgggatttagcgccaagaactgagttcacgtgcaggcgccaccagttacttaccaggcccacgaccttgggcaagtcctcctcatctccgtaagcctcatctgccaatcagcgatggtaccctcctgcctgcagaggagggtcagtggtgccagcatctagcttatcccaagcagtccaggacagaagctttggccggggtggagtggcaactctttccgtcacgtagtgatgttcaaggctctcctgacccaccccatttaccttccagcgctgcccctgtctaccttggtggcctggttttttgtgcttttccaaatccacctggctgggcagtggagggtatggggagtctactctgttttatttgcagagcctcctgtctggactgctccttgcccacactcccatctctccttggcagactcactcctgcaggttagatgtcatggagatttctttgaccccccagctcctcccttccaacctttactctgtgataccttcagtagctgcaatgacctcttgcactatagagttctctacagtgtgcgaagtcctttcacacccatcacaccctggagagctcttgaaaggccctattcccatttgctagataggaaaacagaggctcagaggtacaaccatcctaagttcctgggctgaggtcagacccacatcgggtaggggtgtagacagtggcagcagagaatggtacctaggctccaccctcggccgcctcatcttgcagcatttgggaaaactggcttttcccttctggtagaaagctccagcccctggcccaggagaggtatgtgggttgctgaagagggcctggtagagcgcagaggtccagccagctagagcagactagcgcccagccctgcttttccccacaagtgatgtggcccagttcacgtggctcggcggactagagccaggtatacatggctctgaagtctggggcagaggtgagaaggccctagctggcctgggctgcaaccgcaggcaaaggctggccacagatgagaggggtatcgtgtcaggggcatgacaaactgttccatatggctggcacttcacaaaagacactcaaaacactcttggtggatgagtgtggaggatgctggcagattgcggctgtggaccgggctgaggcatggaggttttccagctctgttacccctttctttgtggcttctgatgagcgacttcatctctctgtgccccatttcctcatctgtaaaatggggagaatatccctctagttgggagggattcaacgaagtaagccatgggcactctcacagccatgcctggagcatggttagtgctttctggcactttctagcatgaagagtggaggtggcagtagcgggagtgagtagggggtggactccagggctgtggccacacaggagggtttcctccactgagcagcatggttgtgcggtcttttaagagaaggtggagagggagatcagggattggggttgggctggatttggatttcatatgaggcaatcccaaacagctgttgctcagagctctgtgggcagccacctggggtgagggctgcactctcctcgccagcccctccagcccctggtgtgtggctttaggctgccggcatgcacaccctaagttgtcagtcagcagacttccagggttacataggcggtttggggctggccatgaagaccttgaatgccaagcccagctcacagcaggcctggccagggcccagcccgtggccacacggagctgggattccagggtccgcatatggcatgcctgtcaatcttcagcgccagctgagaatgcacacctctcctcccactgcgtgaaatctgtggcctgcagcccaggccctccaccccagcctctgcagcctgctatgactccacaacccccacccaagcctggatctgggaatcgtttgcagctcactgcttattcctgcccaaggtaggatgcccctctaggtcaggagggtgggactgctgtcctggtgggccctctgagcaggacttgtgttcaagcctcagtcccattaagaactgctgtgtgaccttggacaagttgctgcccctctctgagcagctgtttattggtctgtaaaatcagaggattggggtaggtcagggattacaaactgcagtcttcaagggtgtcaacaacccattgaagttgggactatcctgttgtacaaatgagaaaactcaaagcacagagaggttaagaaacttagccaaggtcacacaggttatagtggagctaggactcagcccagttttatctgacaccataatatgtgttttccctaccacaacaaactgcctgtcacagatacttgcttgtttgctgggtgatccattttgtccatcagccagcttggtgttgaacacttccttgtgctcctgcaccgtgctaggccctggtatccaatagtgaatcttcagttgagctgggagagcacagctccaggtccggagttctgagtagaggtcacagtctccagtgcagggttgctaggtaggtgcagctctttcctcatgctgtaggaggcagccagagaagacttcctggtggaggggtaaggggagtggggttcctatacagagtggaagagtagggtcttcctggggtctctgcacaactgggtggcatgggtcagggcagtccggctggggaggaagattcattcagccacagctgaggcagcccctgagggccttgaatgctaggccacagagtttggccatgaacctgcagggagtggggagctaaaagagactgcagggcagtggcacctcctttgtgagagctaggagggctggcctcagcttgcaagctagggcaagggtgaggtgtggtccagtctaagacttagttcacccaggaactgtggcagcaggaagagcaaggttggaggcttgtccactggccggaccttcatgctccaccacggcctcttcagcaacccaggcacctctgctggaccaggcgctggggctttctaccaaaagggaaagccagtcttctcaaatgctgcaagataaagcgaccgacgatggagccaggtgccacaatctgcacacctcccccaaccccatctgccatgggcctgacctcagctcagagcttggggcaggcgttgctcagtgacacagtgggatcagagaggctcagagaccagcccgggggcacacagcattcctcatggtgggtacagaggctagagcaggtaggcagcatctttcccaagagaggtaggtctgggtctccctctggccgtcccagggtcctggacatgcttcatggatggtgtgtgctcactctggtaggagtgtaaggttgtaaagagtttcctgggtgttacttactgagggcgcttctccctcccactgatgtttgccccactggctctttttgagctctggagtttgtctctttctggttcatgagccacacacccaggccacacattggggcagaggacagccttggccgtgcctgtgttcctaggtctgaagcctcagcgaccttgcagcaagtaatagacactgggtggggccacaagcgtgacatctttattggaataaaaacaaaaccacagcctctctctcgtgttgggaggagtggtctttagaaatcattttacccaccccactcatggcacagatgaggaaactgaggcccagagataggagggcatgccccaaggtagccaacatggcgcttcaggctatcagctgagtgcagggccacactaaactgtgtaggctacatgggggtgcagaggctggcaggggcagggaccagcagcagcgataggagccttctatctgcagaaaggcaggactgaccctgaagggccaaggaagctctggggacctgtggagagccacccagaactgggactgagagctgcacgggaacccgcagacctggctccgtggagccgcatttgtgttctgcctcctgctgtgagaggttcgccaccacaagcaagggcttatcctgtcatccatttacccagagagccccagtgaggccgggatttgtaggcccaatggtcagggctaggggcaacgcctcagagtcagggcctagtgtgaggcttataaggggcaagggagtgaagaaataaagtggactcaggaaaccaggggctgcccttcccctcatcagccccctctgccaaggcttagcagagtgtccagcaggctcaaccatctgggaggctgctgaccacaggcagcatggcattacctagggccagggtctaggggctctgaaggcctcaggggtcagggagagcttcctggaggaggtgagtgccagctgagccccaaagaatgaccagactgtgaaccaaactgaaagcattccacgcaaagggaacagctgggccaagaccctgtggcagccacactggggcagataatgggggctttgtggaggctaggactgctcagggaaagaaatgaggctggaggtgcccccggggggttggagacggcagaaggaaagaaggttatattttgcttttaacttgctaaatgcccctgagtagatcactgccccacttttgtgcctcagtttcccttttatctcctctgagcttcaggcacctggggagccacagcagggaagtgcctcagtggaagagtccgcttctggaggctttgagctgatgctggggatatgagctgagggaagtatgggcttccccagcacctcgggggcagttggcccagaaggctgctgctggacccaaggcttctccccagtggaggagagctgacctaagatttctggggtttgccaggctggaccaacctgagaggatgagggattaggtccctggggcagcccccactacagactaaggacctgggtcccaggataaaatgagagatgcgcctcccttctctttgctgtgaccaactccttctttcctccttctgcctccttccctcctgctggggacagggaggggacaatatttattccttcccaaggctgcagctgactgataccctgatgcagaggaaatgccatgccagtgccaggcatgctgccggcgctctgggtgcctggtgccctctccaggtgtggctcctccccatagccctgggctcggccggtctgtgtttgcagagcctccactgacctgcagcggcctctctctcatgcctctcctatcagcagagcgccagccatgggctccttggactacaagtccccgggattgcgcaaattcccccagcagtttgcacagcagccagctcaggccccgtcagatggcccaggttcctgctcgggaagcccattcttttctggaataataaagcagccaccccacagcagggggtggcaagcttctcttatcctcacaacccctgactcatgtcaccctcataatatcaagtgggctggggcggggtggggaggtgggtggcgttttccagagggggaactggagtcagagaagagaaggcatgagacttgaccagggtcacacggcccagccaggactccaaccaggcccctgctcagcctttttagaccgagccagtgtttcctgttcagggccatgcaggaggtgagtcaggagcaggccctttgcaggagctgctgggggccagcaggagaggccaccagtctctgtcttccctctttggctccagctgctttaattggctggggctgccagtggcgctgacatttacctggtgggaaggagggcctcctccctcttgaattgagatgctaaaaataacagggcccagcttcccagggccactgctcagccagcgcctgcctgccccctcagctacctttttcctgggtgctggaagctaattgctttgcaagcatgcagttccttgcgctgagaacttcctagggattgggacaggaggcattgcatgctcagcttctgagtctaaagaggggtctctgcaagacctccctcccctccaggcagcagggtgatggtcttctgcctcaggtctccctcccccttttctccctgggtgcagtacctgtccaggttgactactccacccctaggtgcttgggtgccttctttgagctgccagagtttcccctgctctaagagagggggctctgccctccttggagttttctagtactcacctctccctgcaccatactcgacccagacatatgcggtgtggccctctgccctcatgctgttcattttgtcataccagcaaccaagaggagcccaggcttcggagctggacaagtttaaatccagctgtgtgaccatagcacatttccaagcctctcttttctcatctcagaaatgggcatgaatctgacctttgcagtgttgttgcagaatgaatcgcagtgggcaaaacatgcctgatcaagagtggagcccctggggccaggaggaggcgtgtgtacatcatggggcgttcctttctcttgctgtgtaaatagaccctggaactcaaataaattagattgattggaccagaaggggaaggtcttgaagacccaggctaaggattagggactcagtctccctgaaaacagggtatgcttgccaatccccagggcacctccagagtggcctgtgtgtttgtccagttcttgccctgggtcagtgtgaccataatcattttgacattggccagcatctcccgggctttgggatcattccagtggaaaaagtagttttcagtgctctatgcttggcaggtgtgagagcctgggcgtgcttaacccatccacacctcaatttcctcatctgaaaatggggatgataatacttccttccccgttaagtattgtaaggattagattagcaacatatgcacagtacttagaaagtctggtgcagggtaacacttggtatgtgttagctggtactcatagtagtaagaatagtctagcagttgggagtaataacagcagccacctgccgtttgtttaatggtttttatcagatgctgtgccggatgctaagcactttaagtacattatttaatgtcactctcccccacctcccagcaaccatacacaaggtactgttataagctctgagttccagatgaggaaactgagacacagagagtagttgaactgaaaaccagagttcagcatcagccccactagggtggccgtccagattgcctgggaccgtcctggttttagcatggaaaattctgtgtcccagaaacctgtcacttgtgggcaaaccaggatggttgaccacccaaggcctgcctgagtccactggccccactctgaagcccacaggatcctcttcttggcgcaggggcttgctggtgcagtcgctcggccccttcccacacctcataggcccctcccccagccagattgtgcctgcccatcccccagggcctggctccagtctcctctctggcttcctctcttccctcccctctgccagcaggaggggcatgactcatgcctggtgggctctttgctcaaggctgtgactgcagttgtctggtggactctgagctgcccctcaccaggcctcagtctccctatttgcactgagggctttagtggctttgctcccagctttctggagacgttcaggaaacctcttccttgaaagagggagggcagagcgagcccctgcccccagccctggcctgagcagttgggagggatcgcactggcccttccggtgcattgatggagtgcactgctgacaaaggagaaaggtcagcagggggacagagcggagttggtggtggcctgctggcctgcagtgccctcccacaagatagggcttcctgggggaggggagcagtgctccctgggctctgggtcaattcatattgatgcaggcagctgctggttcagcaaagctgggcatccaagcccccagagggctgcggggagatgcctaggtcatccttgacacctcactttccctgacccccacatccaacagttgattaggcccccttaaccatctctggatctgtgaccctctcagcatctcacccctgctggggaccatcttcctgcttctgaatccctgagccctttccagccctccctggcttcccccatcaccttgcataaagtcagaattttgaggctgacattaaggcccttactgagctcagaaaggctgcccagagctgcccaggccttccctaatatcagccttcttgtgccctccaccctccaaccccaaggtcatgtgaaaggtctggggacaccctgagtgccaggcccagcgctgtccagtcaacactccaaccctacccagtatacagggctgagcctgcagcagagctgcagccaggtgccaaatggatgcagtgcccctgccgtgcccttctcagactcccccttgagctgctgccatgcggttgcccagtggatctcatgccccagctcccagagggcaggagttatctgtctccccagcacacatgcagaccaagatgatggcaggaaagcgccatggttggtgcataggcgctggggtcataatatgagggtctgattccggctccatcactgactaaccgtgtgaccttgggcagtcacttaacctctcggtgcttcaatgacatcatttctgaaatgtgggtaataatattctgtccttcacaggatagtgggattcaataaagtgacacttatgaagtgtttgcagggtcccagaacattttaaggatcagtaaagtgagctcccatcagtcatcatcaggcaggtatctatgaaatgagcaccgtcttccaaatggggccctcccagttctttgaagggtccttgcatttttgcccggattgttccctctttgtcttcctcctgctctagcatcccgctgcacccccgcctgacatctcctgagactccaggaagccagcctgccctagccttgcattcttgcctaatccaccccattgccatggaatgccttcaggctatggccaggagttcttcccatgtcccccacagctctgcacaggttcatggaccacagtggatgcctaataagaatttgttgggttgaaccgatattcaccaagcaaagtcacctccaagaacaatgcagcaatgaccagccaggcctctgggcccatccacagcccattgaggacatttctgagaccagtcctgagctactctgtgcaggagaacagcacgtgcccactctggcctcttcggtggcgggggattggggataggtgggggtggcactggggctcagcagccacactggaaggtttttcagggggtttatctccctcttctctgagctgtcgtgcctgttttgtttgcctcggtcccttccccacccccacagttctctgttaaattgtgttattatatttaaacaaatcaattccattgcagagtttttcctgtcctaatgatgagtttgcagcacaaatgccattgatttctcacagccctgaaaaccagttgatgaatagcaccaggcttgtctttggagaggcacttagagcagctctgcatggccccctctgcttctcccctgtgctgtccccctcattcaggaccccacctccaccccacactctgctgccccctgagttggggctgaagtcatgtgataaagggagaccctctgtgctggccagggctggaatgtcatcgcaagggcccggcccctgttctggtggaacaatcatagtggagatttgtattgattttggccaaaggcacaacttacagagcagagaagtggtgcggtgtgatctttgtcttcccttacaagttcagagcgcgttcctgagagtgatggcagatagcagctcagacaccatttctagaccttgccagggctgctgaaagacctttgagcactgctgttttaaagggaggctccagaggtttgagagctgtctgcactggggagtgtaaaacttccctttgtgaaatccttcagaacctgcagtgttcaaagtcacggttaaaccactaccctgggctttgactttcagatcactgccacgtgcacgagcttctctgagctttctaatgaccccggggcttgggtgggcaggtaatattgttcccctttagaggccggcagactgagtcagggtagtcactggagagagggaagggctgcttgtccactccaagtcctgagtgcagcagtggctcccatgtctcctcctacaagggtaatacatggcaggggagctactctgatcaccagccttttcggccgggctttctgtctgtctgagcccaggtcctcgtgcaggtgtctccactcagctgctgcctgcagcataccacacaagcctgtgtattgggctggagtgaggcagcagggagcagcgaggactgtggcattctggagagtgcctgccccacctaaattcctaaaagtttggacaacccatgcccgtaaaagtatactacatgggatgagactgggggccaaatttgctgcctctcccctattctaattcaagcctttgttttggagactagaatgtgtggcccagaattggaaatggctcttcaaggtcacagcacaaagcagtggtgagctggggtttgggtctgggagaaggcgatgaggccccacagccagtgttctctcccctccctcaggcttggcgaggcagtggggtgggggcagggccagggactgtgttctagggaagatgggcccctcacccctgagttcaggggtagctcagcaggccccacttcccttttttctcccttcctccttccctcccatgcagacagacctcctgtccctgtaatcaggttagcctcctgctccgatgagctggaccagctgcctcttaatgacctgtcgacctggccccctcgcaggctctggggtgggggaggggaagctaagaaaagaacggtcggtggaaagaggctgtccactcccttgattcagacctttccacagcttctaggatcaagtccaaacccttagaatagcatccaagaccctgcttgcttctccagcacccaccccctagtacactcttttcctgcagtcacatgatgctgtttcctacctccctgccttttcacatgcaggtcctttggctacttcccaccttctcagaaaactcctgtgcatccttcaaaacccaatttgtgcctcttcctcaggactgcttcctctgggttcctgcctctgtactctcacagcattgggtgctctgctggtctggaacttattcccactgtgttggcctccattattcctggatctggtttctccggagttccgggaggaaaggaagaatattcccttccctctgcacctcaggggtacagcacagagaagtgctcagtgaaagtatagggccagcaaagaagagagaagtagggaccagggaagagaaagagacagacaagagtataaaaacagctgctcccagcccctcatactgccctagcctgcttcctgccagggaggccattcctagcgacgcatgcctggcctgaaatagacacatggggaccttggtagtgcattttcatagctcaacactaagcacccccctcccccttattccttgggcactgaagctccctctcctcccagggccttgcctctgcagccaagacccctcctccagcagtgcccagacctcacccctctgtttctgttaactttgttttataaataaatcatataaataggctcctctgattcctcggagcatgcagtgtttaaggactggggcattgccgcaggcataattgtactaccgaatccatcagctgcctaattaccattcattttgcatttatttctgctaattaaaaagagagaaactcctaacaacttttacataaatactatatttgttctatgtaaagatggatgctaatttgctggtgattagctgattatcggattttatagctgtcacacaggatggccctctctcccatttgtaccccggacaccacttgaggcccctgatcagatatgggaggaaggggtcaagggaggcccacctggggggttcgagggcctgtctgaagcccggggtcaccaggagcaccagatgccactggggctcagggcggggtagggggaaggtgctgcagtctgattggtggagctgggaggaacctgtggctcactcaccgcttctgtatagatggagaaactgaggcccagagaggcctagcacttcccagcaaaacagtgaccagggacagagtcagactgctattctagactggactccagtgcccatcccactgttgtatgctgttgtcaggaggaatttgcagggaggtggctttatctgctgctggagaactatgaggaccagactccaactcatgcagaggaaaggagcacttagcccatggcccaaactgaaccctctgtgtacccttctgaaaacctccacctccttctacttccctgggcagccctgggctttgccccacggcaccctgactgcacttagctaggctttctcccaacctggattgagacttccccaggactggccttgcaccctgtgggctatccggacacatgtgagggtgtcaaattttaacactatgtatgtatgttcatgtaactaaggaaaaaaatataattaatacatcaaacccatgatttcacagatcatagtgcttttgatgaggctaagtaaaaaaaaaagtaattggtttaaagtgatataaataattaaatagtttttttttttgagatggagtttcgctcttgttgcccaggctggtgctatcttggctcactgcaacctctgcctcccgggttcaagtgattctcctgtctcagcctcccgagtagctgggattacaggcatgcgccaccacacccagctaattttgtatttttaatagagaagtggtttcaccaggttggtcaggctggtctcgaactcctgacctcaggtgatctgcccgcctccgcctccaaagtgctaggattacaggcatgatccactgcacctggttgatacatttttaagtacataaagaattaagatggaatatggacacggcttacagtacctaataaggtgggttatttgataacttgaggagggtctgagaagaccaggtcaggaggccaggcagttgaggtcagggtcagcagtgacctggggcaaggtgggccaggtctgcagccaccactgccccatcccatgactgggcagatggtgccctcagattgtgcccttctctccccagccctgcagttggtcagaattagcccacaagagagcagtcatttgtcctcctaaaggtagtttcactgggactctgttgggggaggccaggaggttggacattaccccatttcccaccaagccaccagttgcgagtgtgtcacttcacatggacatgcggtgcacctgtttcccctggcattgataggtgagacactgactggcccctgttctctttcttcctggccaatctgaaaatgcccagttctcgagttaaagggataacagctttgacaaggccaggtgttgtctgggtggccagagagctaagggtcagggtcagcgtggcccattggcccattggagatccccaaggctttggggtccaagggccagggttccaggcctggctgctgcttcccaaagcgtcagtctcctcctctataagatggggacagttgtgctgaaagggttctgagggtcatgtgcaaagtgtccctcaaaggaagactcagtacagccggcagtgagcccagttccaggggccctctcggccacccacccacccgccgccgctgtgtctgtgccgccagagatctccctctcatcagcccctttatcgccctgtacacaatcaggggaagctgggaaggccgctggggctgagggcagatggaaaacaaagagagaaaacaaaggcactgctcctagggggccaaaaggcacctgcctcctcccccaggcctggccttggccaccccagtcctccaggatctgccccacccctccagaaggatagtctcagaactcatgtaggtcaccactctcaggggaccctcaggaagtcactcgtctccaggccaccttttcttatctgtaaaatgagagaattggacaacaggccatgtgacttttggcaaaccttccccctctccccaccctccagggtctccttggggcaggcccagctcgtctctaggaccccccagcctgtcccaggaagtcaagatggtgcccacttctgtctgtggcaaggaccccagccctgccttgggcagggtgaggtaaacaggaggcccctgtttcctgccgagatcttggggtgtgctgggtgctcagtgcatctgtgtggaatgaatgaattatttcatcagaagggggcctactcagagtcagccctaggttgctgctgctgttgaagcctctcagggaaggagacccttctggtcacttgagggaggtggagagaagtggtgaagggctggcaatggcatccctgccaggctgtctgggttcacatcttggttgtgtgaccttggactggtttcttaaccttctgtttcctcatctttaaaaattggttatagtactgacctcataggttgtggtaagattaagtggattaatttacataaagtgcttagaacagtacagctaaaggttaaatatcactatccatttcatcactcttattatgattagagggaggcttacagggaagcacatgaagattaggcatcctggcctctcctgggcacagccctggtgaaggctgggaattgctgggagctatagagtgttctaggtgggaggggcagcagtttgcaaacaggaacatttctatgtaagtatttctggtaaactgttaaacaggggcctcatgagaaaggggcatggattcctaagaatataggaatttgttgtgatttcttttctgattctaaatatatatttgtaatgttaaataatttttaaaacagggcctccaaaattgtataagcctcaggccctgcaacctgagctgttcctgattgtttctgttattgtgattgtatttctgtggcccagccctgtgctgcccactttggtggtcctgacaggatggcccagccttggggtcccagggacctgtcttctcaccctatggacagcggtgttatgtgcaggctggcctctgagctgtagtctacacttcacaccccagatggagggagctctgagggagcagacaaaggaaaatgggtacctcagggaaggtctctgaaggagtcttctctgcatatgcaggacacagagccctgtgcccagaggcttagtggccagccctgctgctcctactcacccggactaggtgtggcaggccaggcccctctcccttcccactccccctcggtatgtgccctggtggacaggcaggggcgggtggggccgtgggaagcaggctgctgagttggaacagtcacccctacagtggtcgttgagtggctggctgtgcaccaagcttcaggttcctgctgggtgcagacccagaatggtccttgccctctgggagctctcccggtaactgggaccacaagatttgcacctggaagggctaggggtgagcaggggaaggctgtactagacccatctctctccgagaggagacaggagagcccagaggtcgtgagggctggaccctgggggaggacctctgagaggacgggccctcggctggggggggggtgctcctagggtgggcgctgtgggccctggcgcctctgccagcagcagggcctctcggcccgggctctgacagggacatttataactcacagctgtgcggtcctgggcccaactgactgtggtaaaccgatctggcttcaggaagtcccgtcccgaggccactccccatcccgacccccacactctccttcacctcctgacacccacatcctgttctcagcgggaggggcaggcggcgggcactgggccaggggcccagccagggtctccaacctgtgggcagagtgggaaaggacagagagcagcagtgaggccccagtgctgcggggtgcccaccattgccagcctcctctcaaagcacacacagggaggcagaggcccagaggcagtgcaaggcccccaggagcccacagggtcagagcgccaagagcataggttgtagggctcaggggaatgttctgcgcctccagatctacctagaaaggggattcgccttctggcctctgtggacccactccagccaaaaggagcctgaccggaggggcagagtgaaccagaggcctcagagaatgctgggaaagacgccattttgggccctgggccttgggctggccctcctttgggacaccccgtccccaagatgcttcgtgcccatcccacctagatcctcccagcctagttcaagtgtggggccaaaaatggtcttgcccagtgctagaaagagagacagtactaaaggctgcagcacaccatggctctgaccccttacatcccttggcctgatacaatgaccagttcttgggccccatcagccagcccgcccctcctccatgcctctccctcttcttctgcacaacgtttgccaaagcttggcccaggtaaatctggtagtctacagcaagattctagaattagatagtacccaacaggacatacatttttgttttactagttacaatttattaaagagtatcagaaatatataactagcctatcaaatcaattatttcaagggcatgattgctttggacaaggccagatttattggagcttaaaaaaaaagtgagtggaaggtgaacattaaattaagtcatcacacaggtagatctcagctcagaccaagaatcctaaagagcgtggaggaagagctgaagtttggggagcacaatctaactcatcaccaggactcttttctgctttaaactctgcatctgggcctcctctcccagttataagcaaaacagccagccctgaaccttgtaggaggggcaagggagtgagctggttttcccgaggtgcgtacacacataaaatggctccgagtgttggtcagggatctggtgagcaattcataatgaggaaagaattcaggcaggggtcacagagtggctttggaagtggctgccggccggccgtgtgagataattccccgaagccaggcacggcgcagagaggaggccacggcaagggctttgtacacccggctaaaaatacccccgacagcttctccctgtcaccctgcctgggggccgtacaggaaagtgatgctgttctgcttttcctactaagaagagaaagacaacacaaagtccccagtcctggaagaaacaaaacttatatttatatatttttcaaaatcccactaggaggaattggcttgctggttggagtgtggctgggcggggaagacacagccagctctgataaatcaggcatcccggggtgtgcttaagtgacccaagaggccgctgagattagcttggcggcagggacagaggtgggaggggagtggacggcacaccggcctgctctcacacacgtctcatctctcccctgtgtacccaggaggaagaggaggaggcccgttggcgtcggaccaatgctgcaaggggtgtgaggagaggagccgctgtttttcactgagctgccataccccgaaaggtaacaccagcccccgatgcccaggccataccatcacctttgcctaagcctgggcaggggcaagccctagcagcccagaagtgctgtggctggaccagagctgagggttttcagctgcttctcacagcctttcctgggcctggctgcagggcctctctataactccttgtgtggtgctcatactgccagaaaaggcttctgggtgtcagtttgtctgtctccaaaatggggcactgggctcaggtcctgtacttacctcagttctcaaggattctgtgagtcagttgtgtctgatttggttgagccatcttagcagcctggctcagttggaactctagggctgtagccaggggtcccagcctttgtggatgctggattctaaggctacgaggtccacagtgccatgtggggcttgagaagggaggattttccaaagcagacctggctggagatgtgcttcactggggatgtggctgtggtctcctttgtggcagcattcaaaattccaaagttctccctgtcagctctgggcaagaattattatctgcattttcagaccacgagaacaaggcacagggaagttaatggtgcctgccagggatcacacagctagctctggccacgccacagcagcttggcttcatcctatttgccataccagcttctatgcttttacttcgaccgtactgcactcatcctctcaagagaagttctgcttttgaggccaagcaaccactagtctgtattgtgtgcctgtgagacccatccctccatccatccatcatccatccacttacctgtccatctctccatccatccctctttcttttagtccttccacactcatccacccattcatccctccaccacctatccgtccttccatccaactacttacccacccattccccccatccacccatctatttactctttaattcactcatcaaatattcatggactctcacaccaggccaggcccgcattaagggctggggtttttgtttttgtttttgtttttttgaggcagggtctcattctgtcacccaggttggagtgcagtgacacgaacatgattcactgcagcctcgacctcccaggctgaagcgattctcccacctcagcctcccgtgtagctgggactacaggcatgcaccgccacgcccagctgatttttaaatttttgtggagacggggtctcacttcgttgtccgggggtgggttttgaagacagagccaatttagccctgccctgagagggtgtggtgtgcaatggagtacgactcagatcccagagccagactgagttccataaggcagtgctcaaagcctgtgtggtgaccatgacgacacaggggacgagggagaggggacgtggctgattctgcaggcagacattcggggaggaggaggcggcattgctcatgcattcattccccaggtgttgaccgagaaagtctgtcaggaactctttaagttcagagatatagcagggaataaagcagacaaaactccctgcccttacggcgcttgtactctcgtgaggaggcatggatgataaatacctaaaaagtgaataggtcaggtgacgctaagttttaagaagacaaatttagccaggtaggagcacagagtctacagtgtaaagtactctttcactagccaaggaaagcttttttttttgagacagggtctcactctgtcactgtaacctcgacctccccagctgaagtgattctcccacctcagccccctgagtagctgggactacaggcacacaccatcatgcctggctaattagtgtacttttagtagagatggggttttcccatgttgcccaggctggtctcgaactcctggacttaagtgatccacctgcctcagcctcccaaagttctgggattacaggtgtgagccactctgcctgacccaagaaaggcttctgttaagttggccatttaagatagctgaatgcagccagggagtctgcagggatgtacttgacctgttcaaagaaatgcaaataatccagtgtggctgggaggatgtcaggatagggggcgaagtcagagagatcatggaggacccactcctgtaggcggacaagtgtggagcagagagatagctgggaagctgttgcccacatccaggtagaggtgatgggaacagggacgaaggggtagtggaggaagaggtgggaagccatcaaaggctgaatatatttcagagacccagcaggcaggctcgctagtgaattagaggtggaggatttaaaaagacggagacagtcagggaaggcccttgggtttgggacaggagccagtggtagaagggaggtggttatttgctcagccagggacaatggccggggagggctgcgtgaagctgaggagttctgtttcagacacattgagtttgagatgcctttgagacgttcaagtggaaagattgagggggcagctggaaatatgagtcgggaaggcagagagaggtcccagactagagatataaatttgggagttgtcgtggattgatggtgttgcaagtcgtgaggcagatgagatcactcgagagtgtgtggcgcttgagagggtcaggagcctgaatgtgagtcacggggcacccagccgtttaggggagtgagtggataaggggtctgcagaggagctggagaaggtgcagccagggaggggaacagaaagcaggctctgagtggacaagcaagactctgctgggcagtgcatggaaaggactctgtatgctgcagtgggaacagcctacacaaaggctcagaggcctcaataaaccagccatatttggagaggactaatggagagacaggagagaccacaccgccttcctgcccacacttggccacacaggggctaggggctgtgggcaagcgcatgcctgggccctccccgtcaccctggccggcactccctgaccctggccaagcatcttgccctgatgtctgtccactttcccactttcttcagctagcactatggacctccctcctgctttctggggctcctcccccttgtccaaaaacgcagggctccaggtggcaggtcacatgctgcccatggggaagaggcaccgagcagctccctattgagcacctgagcatggtgtggatcctttatcctaaaagatgtgaaccttcccaggccgcgagtgagtgtcagagcacctgctcccagttaggggagctctctgcctttggtgggcaatcatatacgtgcgtgtcagtgttgtgtcacttcattctttctccatctctgtctctctctttctcagcctctactgcaaacatcagcagtgccccctccaggccaggccccgggctgggtaggatcccgaggaacaagtgtgctcctgaccttccaggagctccccaccgctccatctctcccttggctcctgagtgtacctttttggtgctcaggagcctgagcctgacttagaattccagctttgccacccaccagtagtatgtcttggggtgctgcagctgccctgtactgcagttcacaggagagggctccccgagactctggaaacagacccaggagcttctgagctatccctctgctctggctgaggtttgaccccgggcccactcacccctctctccacagcagagttgtgggtcttgtcagatgctcttccccttcagcgtgcagctctagtcccaccttctccagaaagcctcccttgaccactctgaggtcaaccagtgtttcctaagcacctgtgttgtgccaaatgcagggctcgagtcagggtgtgcagagatgacagtggagggtttctgcgctgagaactggcagtccagatggggtggtggggggacaggtaaagaacccacaccttccagcataacagtgagcactgcaggtgcccagcagagagaacggccttgacttggtcaggaacggctgcacacagtatagctgccctgaacaaggccagaggccgggcaggtgtgcaaggtgtgataggggctggggggtgggggtggagagaagagtgtgtccaggcgaaggagactcgggagcacagtccagcccgtctgcagagtgagtgcggtctgacatggccaggacgtgagaggaggctcaggagacttttccaggctgagaattgaatggagccaggcagggacttgtggacctcctctccctcgggaaagtcagggggagatgcccctccaactctgcatcggggactagggcagcagcagcagctgctctgatgatgcatggctccgtggcagagcggtggcaggaggcttcgggtaatctcattagtgtgcccggcggaggggacgagtaatcccgtgcctttagactcacttttctttaagcctgtccctatccattctctccctaaatccttgtactgctttggtgacatcaggcgggactggactggacttacctccattgaactgatgggtaaaacagggttagagaggaaaattcttgcatgatgccatagctcacaaggggcaggaactgcatccgtctgactccagaacccatgctcttataatcctctactatctcccagactgtcttagactatccaggcttatagactgcctccccactggccccattttgcaggtgaggaaaccgaggcccagagaaggtaagacacttgcctagggccacgcagcaagtcaaggacagcactggcaccagaagctcacctggcctgtttgtgtccccaccccaccccacaagcaggcacagggatccccctggtccctgcccatttctgcctggagcacccactgtgcttggtcttcctgcagtctttggcaccggctccggtggaaggcaccaagttcctcatcagaaggctccattgtgcctattgtttaaatatagattactaatgaaatgccttttcattgccttcccagtgaatagtttccgtgtaaagttaatttgcagtgttatgtaaattctgtttaacttcaatcaagtttctaattatgtttttaccgcagtaattcccatttgatttgtcatctcctgttaggtattcaatgttcggtgggcgggcttgctttccgtctgcctctcagttttccaaggccctgacctcctctctgctgtgtgtctgtctccgtggctcctggcttcttcatccccttcggcttcttggtggctcatttcccacctcctcgccatccctccatctatctcctgccctccaccttccttctttcttcctcttgcccagctgcaccttcttccccttctgttttcttcttctctgtctcccctcctccctccttcctgccctctttccccctccccctctgtctgtgtcttccttctctgtatcttctttctgtatcttcctttcttctctctattccgctcatggccttgcctctcactcttcctccctttctgtgtctttctccactgacaagactctctcctgcctcctctgctcacatttccatcccagtgctcttcctctcctgaggtcttctctccctcctcctccacagtagagcctttcccgaagctgcattccggagtgcccgcgcgacagagcctgcgaggtgtgctgggctgggggctggggccaccagaggagccctgtgcagccctgagttgttggggtgggggattggtgaagaacacagagtctagggttggggtctccgggttcaaatcccaccccaccccttgttaactgtgtgaccttccggttagttcacattgatttctgtgctgcatccataaaatggggtgataattttacctgcctccacagtaaagcccttcccgaggcttcattctgcagccctgagacagtggggtgggggattggtgaagaacacagagtcatggagttattgtgagaagtcagtgagataacctatgtgaagggctttagcggagggaggggcttggccagaattagcctttttactttcttaagagacaaggtcttgctttgtcacccagggtggagtgcagtggctcactgcagccttgacctcccaggctcaactgaccctcccacctcagccttctgaatacctgggactatagatgcattccagcatgcctggctaatttttaaaatttttattagagacaaggtctcactatgttgcccaggctggtctcaaactcctgggctcaagcagtcctcccatcccagcctctcaatgtgctgggattatagatgtgagctgccacacccagcccaggaattagcttttatttgggaactcttggccatgcctttcattttttgcggccttcctgagatgcatctgcagtgagtttctggagtcctgggggtcaggcctgaggccagggaagggtgggagctggctgcagacccccatagagctggcatttcccgctccccactctccacccctcagccttcctcccctagagcagggtctccgctctgcctgtcaagagatgtggcgtccttctgtcttagtgggcccatctcaggctgtgaggacaagcctgccaccctggggtagtagcggagacacagatccccaatgctggaaaagtgctcaagactctggcccgcagacctttcccaagcaacagaccaaaggcagagccgctcctgctgagttggactagacacccccttcttctaccctccctcaccccctagatgccccaaaggctataatataccatggactccagctacaaaaccactggtccaggtgcagcatgttggcagctctgccatttatcacagggacttctctctgagccttggctcccctcctgtgtggccccaacgttgggctttgggattctccctgagtttggggattgtccctgtagtcagggaacggctgggtggccacagtttcccagcagacatctgccctctgggtggggagggcggaaggaaaacaccagacacaggcagggctggggctgggcgggtgctctgccccctccctctgctcccgcttccgccccgactctgctgggcttcccacccagcaaacccctggcacatccaggaagcagaaaacaagtgcttggggagggcattcttctgggtgaagaagggcagccggtcacttgtccttcagagacacagaagcctgggccacatgactacctgacccacaagtggctgtgcgtgtgtgtagtgtacgtgtgtgtgtgtgtgtgtgtgtgtgtatatccctgtccctggccaaggaaaccttagccatcacgtggctggtttctctcgctatttgtccaagtaagcagttcaggccagctgcagccaggaggccgtgacacagagccagggagaagggccacattggtgtgggtggtggcagcgaggatcgccatgggcatcagggagccccgagctgggtcctagagctcttgggcctcagaatctggtatggggaggcctgggctggggaatggccttgttctgatcctctgccctccctggacgactgacctccctgccccaacccatctgtcaagaaaaggcacagagcttgataacagagaactctctcagccctaaatagagagggtgggcaccttctgaccagggggagccgagaaagacagagtcctcaccagagaaaggggcacacatgggcacaaccaccatgtgtatggcccctggagtgtgctttagagccctggcctccgtggcaggagtgtggaagccaggcctcccgtgtgcatccatcaggccactgaattattagcacctactgtgtgccaggacctgggctaggcagggataggggttgtcagaacacagaccttctggaaacttcgtcaaaccctcgcctctgtgacatattttcttcccattggatgggcagcatcacctttcattgcaaaacccctgtgatcttgtcatgagctggccatttcccaccccactgccattccaggaggatgcaacccctacattgttgcagggctcaggaagagcagtgagaggcaccgccgagcctctcatggaccaagcaggtgtttctagccagggagagtgtccccttcctctagggaggtgtgagccagaccctgggcttccaaagcaaatgtgtgcatgtgggcagaacacagaggccctgggctcggacacctgggggccttctcctagcccacatggggagcagagcaccaggggaagtggcagctgcagagtggggcctccccaggccttcatcgaggtttgtcagcctgcatactgtgtcttgcatagatgacaccatctctgggggcctggaggaggagggctgtggtggctttttggggccatgcttctgagagcccacctgcattcatgtgtctgtttgtccacctcctccctgcttcttccctctttccttcctttgacaaacatttcctggcagccaagtctgtatggggcccacgctccacaaaagatacatccctcaccctgcatgatcacggccgaactggaatccagcaacattccagggtgggcccagggccaggcccaggtaaggcctaggagagagctggctcttggctaggaggcagggcatggctgaccccacaggctcccctgggttctgaggaagcttaggcgtacttccccaggataggccaacggcagagcccaccaggtgcctgagacaagggggtgtagagagccagcatcaaggccacacagagcatcatcagaccttgtctctgttgtgatgaggtctagggtattcaatctggaagagtcccacaggctcgtgtgctcaggctgttctaggaaacgcctgtccggaaaaggggtggagctgggtggccagggctgagggtgacgcagatccgccatcatgccacctacaactgaatgtggattctgggccggggtttttaataaagctgctgggtcagcatcccagaatgctgcctaggcctgtatgtccccagcctcagcttgcatatctctggggtcacgaggcttactactgccgtcttgtagttcctcctgggacatggggtcctggcctcccaccaggctgacgctgacttctgtcttccaccctgcttgtcttagggccacagactttaggcccttggcagtttccaattgagtccctcccgggctttcctccctgcaggcagagcatcaagctgggtctgtacgtggccccgccagggcctgtttgattggggtaatctggacaagtcatcagtggcctgcgctggcagccagggtgtggctaaagtcagttcctgcctaagctgggctgacccaccttctcaccactcaggagctcccggagccaggagggactgctgtgagtttgccttcatgaggaggcccttgggctgcctttggtacaggcaggagacctggatccctgctctgtccctatctctgtccctgtccctggggtaatctcgagcaaggctgggccccaggcaggcccacaccccctcccatctgtgttcatccccagcactaagccaagaggcttttgtccctggtgggctgtcggccagctggaagagtcctccttgctctctggcctatttgctttctgagtccctctgccctgggagagcatgaatgggcaggagaggggactggagagggctgagggcctctgttcagatctctgccctcactgggtcgggctgccaacctctgcactcccaccatacccccaacctgtggacaggtgagcctccagttcctgaggccacagggaatgggctggattcacctggaggccatgggtagccttgcagcccctgggccaagctcccctcccacccagactcctccagacacttcaggggttcaggcatgccaagtcagggtggggtgaaggggtctttctctaggcgctgtgcctgtggttgacatcacgttgtcctcatgtggggctgcgtggccccgtggggtggcacgccttctgcaagagctcgccctccaggaagttctgcattcgaagcctgaacttggccttggttcactcttcctctcatcctggtctcttgggcatgacttctcccaggggacactgctgtctgctgacttggaaaggcagggattcaatcaggggcccccgctcagctgtgtctgaagtgtgccctcctgggaagaaaacccagcagcacttttgtcgaggcctcacactggaaaatgaacggtgggaggcctagaggtaagaggccaaaggccactaagcaggccagcgtggcctgcccactccagcccccagaaagcattggtgcttctgaggaggcttgctcggccctccctctcccctgggctgggtggggccagtgggacaggaagccagggcggggctggaggatggggctcagggtggcctgggcctgagccagggatgaggcgaaacccaaccctggcctggccccgggccgcagccgtgcaggtcactaggcctcggcgagtggccacccgcccacccaacaggaagccctgcccagacaccacctttgccccaccccgtattctctacggctggcacttctcctatttcccatgagagctgctgccaggaatcctgccctcttgagaaaggaagcccgacctcgggccgccctgcctctggcctgcgctgaccccctccctgggcctccccgtggtggcagctctgggcccacgcccgtcctgcaccccccacacatgctaatgacttatctcctctcagacaaagcctgtgacccttggggacctagcaggagaaacctcacagtgggactaggcctgggagccaggaggctggggctcttggtctgggatcctccaccaacctgctggtgcacctgggcaagtcactcagccactctgggtctcatctgtagaaaaacagggagaggcagacgctctgcccagcaatgagcatcccatgggataaagggtttggggtgggttgaatgtgtgccctgtgaagacagccaggcttggggggtgataacacaaaacctccccatccacccctgtctgcctggaaaggagccccttctctcatctcccagaagccgggcgacggagcatgcctccgtctctcagctctgctcagggagctgggccagaagcagggatggggctgtgctgaggggcaggctgtcccaccaccctcccaaccccatcctcttcctccctcctggtgggtgctctctgacccatgacccacctccccaagtaagcccaagcccacctcagtatcagcaggggtagcagcttagggaatcaactgtgtcttaaagggggccaagcagaggggtcagggcaccacggggaaagaccagagtcgttgtgacattggatgggttaagacagatccgggggccaccttgagctcctgggcgagctgaaagcttgtcagcagcagggaagaccaggcacctgagcagccaagcccctgccatggggtggccacagctcagactctggtggccttggacacattgctgctctgagcctcagtgtctgcatctggcaagtggacctttcagagccagtgtcttagggtgctgtgagaagtccttaagatttggggacacagtgctgggccccctgcggcccttccctttgaatcagccttttccctgtgagggaaacattacaggtcaggattaggactagatttcgtaggcagtggggagccactgaaagttcttagaggagtagtgagttcatggggagaggaaccggcagcagagaagcctggcacactcatccggtgttggagccctgattcaagaggggtcatggggcaaagaaagttagcccaagtgggtgtcagcaccagctgggcttgggaggcctcagttttcctcctgtagctgggtgcctgtccgcaaggctggagaggcgctgctcagagccagcactgagggtggcaccaccacccctccttcttcctctggtgcccctgagtcccaccggcgtggggttgtctgggtttgccactcaggcccgggtgggccccactgcctctccctccctccatggctttctagctctgaatgggagtggactctggaggctgcagtgggctgcgggatgtgagccagggtgggggcattggcggtgggtggagtcacgggctgggtggccatgagtcaggaattgctgggcctgtgtgtcatctggctgcgtgctgtgctggctcctcccgcctgtctgcctcatctcgcccgccgccatctgggccccctgggctgctccaccaggtgatggtgctctgctctgtttataagagttcaaaacgtaggatggagtagtcaggggaccgggctctagggcccaggctcccccaacaccagaggtgaccttgggcaggtccccttcctcttctctgagccaatttcccccattgaagagtggatattaggctggccaagggatttcagccatggccccagatgagatccgaggcagctttgaaagatagcccagcccagtacagtggctcacacctgtaatcccagcactttgggaggctgaggcaagaggagcacttgagctcaggagtttgagaccagcctgggcaacatggcaaaaccctgtctctacaaaaaatataaaaaattagctgggtgtggtggtgggcgcttgcagtcccagctacttggagggttgaggtgggaggatcgcttgagcccaggaggtcgaagctacagtgatcagagattacaccactgcactccagcctgagttacaaagtgagactctgtctcaaaaaaagaaaagaaagaaaaaagataacccaccccaaacaagttaaatcagatctccggggcggggcctgcggccaggcttgaaagctctagtctggatggcctcagacgggctgctttctccgccctgcccggatccccaggcagcactgtgggctggtgcatgggttctggagcccagaggctgtgctgagtacagctctaccactttctaatactgggcaagtgaattcatgcctctgagcctctgtttcctcatctgtgagatggggctaacaccacccaccttatagaatctgtaccagtgtcagccaccatgttctttgatctaagccagttatgcaccactgctgccttcactgcccattcattcttccagaaaatattcggggattcctggacctgccagcctggtactgggtgctgtggcaacaggaagaggaaacccaccatgggggtccagccttttaggcctttccagggccccagaggatgggttctgtctgttgatgggcaggtgaagggtgactcccctgagaatctcaccgtgtcgctggactgagggaacccctctttctgaaagaacgaatgagaccccagattcaagggagaagaaggggcatcctaggacttccctgacagcctcagctgggaagcccctggggaggctctgaatgccttctggggtgggccctgggccatgctctgggcagatgctggctcaaacagggctggcagtagacagaacagaataaggaccctcctccttgtagtccatcactgggctggactatgtcctccatcccgtggtcctcctggcagcccagggcattggcaggcatcgttcctcctgcttggcagatagagagacagagatgtcaagggatgggaggcacttgcctaggtcaagggctggatttgaacctcacttctgtataaacaaaatcccagtggggaaagtcgagcttccctgggaatctgccctggtgggactaaaacgtgatcggcaaacctgtcatcccctttcttccctggccttccagcaggtcccctgcagaccaccactggctgtccttgcgggagagacctgatgttcctgtaaatagcaagtgctcctgttgcctgggctctgaaagccagaggttgaaccatgcacttgtcacccactaaaccttctccctcctcatgacccattggagaaactgaggcagagagaggtgcagggacttggctaaggccatgtggcttgtgagccggccaggatttcatccaggcctgggtgaggttagagcctgtgcccagacccgccaccacccgctagcaagaacaggactttcctttgtccggcatttttaactctgggtcttggccatcacttcagactggcctggcccacgtgtggccagaatcccaaagggatgcctgtttgggaagcgtgaccgccagggggctggcacctggcccaggaagggggtcatcgagaacactcagtgctcagtggtttgtgtgtgccaccgacagtgcccgtgcccttcagcgccacgaccttcctgtgccaatcatgggtatgatgtcagttcatctaatccttgagctgcagttagccccagatgaggaaacagactggagggataagtgactttcttgtgggccaatattggaccccctgggtcctcagttggacctccaacaccagaatggacctgggttccattctggtccacaaaccccctttgggtttgtgtccccttctctgtagggtggcaggcttgcactcagagcttcccaaggacctccaaggactctgctgagagcctctgccaggcccatttaatgctgcagggcatttaggattgggggcctcccagaggtgggatggggtgccctctagggcagccctcagaagcatagggccaggtggttggcaccaagcagagtgggcagaggcaagaggcaaaacttctaagagaggccaccagcaggaaattccacttagaaccctggcattgcaagtggcaagggcccaggtgggtgccgggggacctggtctggccacccccagctaggcgcccctttaagcaagacctcggtccctggaaaagggatggctgtgcccaccctatggggcctgatgagtggtgggtgtggaagggagtacctggcacggattttgcacctggaggatgcttgacaccttaggctgcttctgtggaagaggaggtgaggaccctgtcctgggagcaggtggttctacgaagcccagctgtgggggtctatgaagcctctcctgagttggtctcggactcatcttcccagagccatgggtctttctctatctctgtgatacggggttcagtgcccccatcccagcaggaccccaagtctacactgggcagcaaccctgagccagtgataataatgacttatggcccctgtttacggagcatttcctgtgcacgtgcatatgggcctaatcttgttatgtccttcaacaactctgtgagagtagtgactcttagtatcccccattttacagatgaggaaactgacccaagttcctagcccagtatcacgcagctaagtaagtgtcagagctgaggcctctctgatgcatcggaacctagatgcattggaacccagagaggccaccattctatgctgtgccctcatcccttgattaaagcagaaattgttcatttggtgacttggggagaagggagccccatccctcttcctcaggtttgagcgggccacctgtcagagttcaaggcctctttgattgcttggaggtgttggctggggcagtcgggacagctttccccctccctttcccagttccaggtctgatgcaaactcaaaggaaagggaagccagtccctgactgggcctgagtcatttgtttctgaatcctagtttgaatcctagttcccgtttttatcatggtgtgatcttggctgggcccttccctctctctggtctcagtttgtctctgttcaagtccagcaccaagggactaggttggcaggggccggaggccagacaa

SEQ ID NO: 1635 - DNA, 7588 bp, Homo sapiens
ttttcactgtctgtggacattaaaaaagcgagcggcggcggcgggcgccggggagagcgggcggccgggcggcaggcgggcgagcagcgatcgggcggccgagcgagcgagcaacgccggcgcagcgcggtgaccccagccccagccggcgcggagcaggagccggagccgagcggatctcggcgccctcgctgcgctcctcccggcccgagcctgccctacccggcggtggcggcggcgcgtcctccatcggcggcagcggcgctcgcagcgcccgtgatttcgtactactgctggggctgccacctcctcctccagacgctctcagcagacttgagtcctggtccttctgcagaggcctgagcaggaggaagaggaggaggcccgttggcgtcggaccaatgctgcaaggggtgtgaggagaggagccgctgtttttcactgagctgccataccccgaaagcaggatggagctggagtgaggtggaggggccgcaagctgctgaccggcgtgtgggacactggtggtttgcagatcactgaggctggacaacgttcatggctctcgggtagaacctagtgaaacggccagaatgaattctatggacaggcacatccagcagaccaatgaccgactgcagtgcatcaagcagcacttacagaatcctgccaacttccacaatgccgccacggagctgctggactggtgcggagacccacgggccttccagcggcccttcgagcagagcctgatgggctgtttgacggtggtcagtcgggtggcagcccagcaaggctttgacctggacctcggctacagactgctggctgtgtgtgctgcaaaccgagacaagttcaccccgaagtctgccgccttgttgtcctcctggtgcgaagagctcggccgcctgctgctgctccgacatcagaagagccgccagagcgatccccctgggaaactccccatgcagccccctctcagctccatgagctccatgaaacccactctgtcgcacagtgatgggtcgttcccctatgactctgtcccttggcagcagaacaccaaccagcctcccggctccctttccgtggtcaccacggtttggggagtaaccaacacatcccagagccaggtccttgggaaccctatggccaatgccaacaaccccatgaatccaggcggcaaccccatggcgtcgggcatgaccaccagcaacccaggcctcaactccccacagtttgcggggcagcagcagcagttctcagccaaggctggccccgctcagccctacatccagcagagcatgtatggccggcccaactaccccggcagcgggggctttggggccagttaccctgggggtcctaacgcccccgcaggcatgggcatccctccgcacaccaggccgcctgctgacttcactcagcccgcggcagccgctgcagcagcggcagtggcagcagcagcagccacagctacagccacagccacggccactgtggcagccctgcaggagacacagaacaaggatataaaccagtatggaccggtctgttcctctttccagatgggtcccacccaggcgtataacagccaattcatgaaccagcccgggccgcgggggcctgcctccatggggggcagcatgaaccccgcgagcatggcggctggcatgacgccctcggggatgagcggccctcccatgggcatgaaccagccccggccgcccggcatcagcccctttggcacacacgggcagcggatgccccagcagacctacccgggcccccggccccagtcccttcctattcagaacataaagaggccataccctggagagcccaactatggaaaccagcaatatggaccaaacagccagttccccacccagccaggccagtacccagcccccaaccccccgaggccactcacctcccccaactacccaggacagaggatgcccagccagccgagctccgggcagtacccgccccccacggtcaacatggggcagtattacaagccagaacagtttaatggacaaaataacacgttctcgggaagcagctacagtaactacagccaagggaatgtcaacaggcctcccaggccggttcctgtggcaaattacccccactcacctgttccagggaaccccacaccccccatgacccctgggagcagcatccctccatacctgtcccccagccaagacgtcaaaccacccttcccgcctgacatcaagccaaatatgagcgctctgccaccacccccagccaaccacaatgacgagctgcggctcacattccctgtgcgggatggcgtggtgctggagcccttccgcctggagcacaacctggcggtcagcaaccatgtgttccacctgcggcccacggtccaccagacgctgatgtggaggtctgacctggagctgcagttcaagtgctaccaccacgaggaccggcagatgaacaccaactggcccgcctcggtgcaggtcagcgtgaacgccacgcccctcaccattgagcgcggcgacaacaagacctcccacaagcccctgcacctgaagcacgtgtgccagccgggccgcaacaccatccagatcaccgtcacggcctgctgctgctcccacctcttcgtgctgcagctggtacaccggccctccgtccgctctgtgctgcaaggactcctcaagaagcgcctcctgcccgcagagcactgtatcacgaaaatcaagcggaatttcagcagcgtggctgcctcctcgggcaacacgaccctcaacggggaggatggggtggagcagacggccatcaaggtgtctctgaagtgccccatcacattccggcgcatccagctgcctgctcgaggacacgattgcaagcatgtgcagtgctttgatctggagtcatacctgcagctgaattgcgagagagggacctggaggtgtcctgtgtgcaataaaaccgctctgctggagggcctggaggtggatcagtacatgtggggaatcctgaatgccatccaacactccgagtttgaagaggtcaccatcgatcccacgtgcagctggcggccggtgcccatcaagtcggacttacacatcaaggacgaccctgatggcatcccctccaagcggttcaagaccatgagtcccagccagatgatcatgcccaatgtcatggagatgatcgcagccctgggccccggcccgtccccctatcccctcccgcctcccccagggggcaccaactccaacgactacagcagccaaggcaacaactaccaaggccatggcaactttgacttcccccacgggaaccctggagggacatccatgaatgacttcatgcacgggcccccccagctctcccaccccccggacatgcccaacaacatggccgccctcgagaaacccctcagccaccccatgcaggaaactatgccacacgctggcagctctgaccagccccacccctccatacaacaaggtttgcacgtaccacaccccagcagccagtcagggcctccattacatcacagtggggctcctcctcctcctccttcccagcctccccggcagccgccacaggccgctcccagcagccatccacacagcgacctgacctttaacccctcctcagccttagagggtcaggccggagcgcagggagcgtccgacatgccggagccttcgctggatctccttcccgaactcacaaatcctgacgagctcctgtcttatctggacccccccgacctgccgagcaatagtaacgatgacctcctgtctctatttgagaacaactgagggccacccggtcggggccatccctccacactctgcatcctaccccacctacccaacacacttttccacctgggagcctgtgccctcagaccgccccgcaccagagccacgggctgtggggcggggagccctcccccgctgcagccctctcagaacagaggggtagggagggtgcaccagtgcaccaggaaggctgtgtgggtctggagcccacgtcccacctccacacccttggcttgggcccatgcccagcgcaggcctgaagaccaccctcccgagaggaaccagcccggtaagagggcacacgctgatgcggcttcccggtccctccgcgtgtgccgattccagatgaccttccagtgtccccaaggttcttccatcttctagactgtaaccctgcctccctgcttcctggtccagagcctccctccagtgactgtggagcctgagaaggcccccgggccccagcatgggccccgagccttggaggagcactggcagttggtggcagtgagaccagccacccaccaccacccaccacagaaaagcacaaacctctgggaaagacaacgtctctcgggggccaggggtcatcggtttgacccctgacctataagccaagataccccataaacacactcagaaagcagagaaaaaggacaagagtctgtgtttgagagggggtctgccattcctgcttggggactggtggggaagagggccaggacatcttctgagccaggacgtccctgaggctccacctccaagctcagacagggcccaggcttggggaacagagagagcaggtgtacacccaaccaaagtgattgtgcccttggttggggggcgcgggcatataacctgtcagaagcaaacaggagcggcaacttctaactttgctccaagccactctctttttaaacagcaacaatttaaagctatgaagtcacctggagaaaaggaacgttgctcttggacagcaagcaaaccatttctctccgtctgttctgtttttctcctagtccctctcctgccacctctccaagacttccgtgggacacccacttccctctgtcctagttctctttgtccaatcagatggcaagggcagtgcgtggaaaggccggggaggtgcagaaaccagagcccagggcaatggtgtctgtccagcccctccctctgtccctgtgctccaagctgcccccggctgcagcccaggccatggacatgtgcaccagtatgtacctgcaggcatcagggggaggggggcgtgtttctgggcctgccccagacactgcccttggctgccagcctaccctgcctgcactcctccaccatcacaatctcacccaaactcctgctcactcaagcaaaagcagcctctggccttccctccaccgctttgctccatctggcttaccactctccagggcctcctggggagcctgtcctgtgttcactttgtttcaggctggtctgtgccccgtgagccacatggcctagggtgatgccaggttgtcccgtcactggggtcccatctgtaaattctttgcgcccttcccggctgctgcctggggccctttcctgctctcccgtccgctgtgggtggtccccagcactcctctgtgggttttaccggaaaggtggccccagctgttgacttccagtcactgtcccagacggcacaaggttttctgtaggaaagctgccattgccccggccccttttcttcctttgtcccgttgtcgaggttttttcaaatagcgtgttgttcagtatgcaaatcaattattttaagaatcgcttttgtaaatatctttgtgaatattttagtatcgtctttgataatattcaacattttcatgacctggttatagcctttgctggtgtttttaaaatacctggactcaatgacaaagaccgagtcttctttttttttaaacaaaaacaaaaaaagcaaccagggctatttgtacagttgaaggggtgaacagaatgggcggctgtgctgggagttggaagaccgggcagcccgctatttagagccatccctcagtcagctggcagggacaagccaacgccaggtagcatgtggccacccttgcccagtgtctgtggcctggcaagtggccacgccctgtgtcagaccatctgggaattaagctccagacagacttacagatgccttccttaggagttcttgcttcttgcgttgatactttgccccagaaaggcctgggattcattctggttcttatcagggtgtgtccacactctgctcacaggtggatccacggctttccagtgcggagagtcgagatgctccctgcagcccaggccccgggcacctcctgcaaccatctctgggctcagcacctgaggcgggtttcctgggtcccctctccagcaagcctccaccagcaagctcggcccagagcttcccttccggctggctctgaaccgtgcgtggtgcctacagcctgcagtctggagacaagctcttccggagtgctctgggagccaggccagggtgtgagggaggtgcagaggcatccggggcgggagcaagccccaggttgtgacaggtgcaggtagacaacgcccataaacagagatggtcctgaactctggagagatccttccctgatcctttcggacgactacttggagccataagtaacctcagcaaaaacgaggcctctgcaagccacttttccatgccaagcatccacccggcccacaggcatgtttctgccgccactccgcaagatggacagggagccagcaggcaggcgggaagggccaagtacaggcaatcacccccatcttcttggtttgaagctttatccatgtatcatgttccgtgtagccattttattttttaagaaactgctaatactttctccctaatggaagccctgatcccccagagagctacaggtctgctcccgacgggcctcgggcctgacccgtccacacagggccgtgtcaacagcagcgactcaagggacgtgtgtacatatgtaaatgagaaatagagacgtgtcaacagatgcattcatttctcttggaatgtgtattgtttttattttgcgaaacaaaacaaaacaaaaaaaaaagcttggaactccatcacgtggaaaaactagatcctgttggttatagcatttgtgagttctccacgtctgtctctctcgctcatgtaatatactctgaccctgagtggaaaggggtttttgttctgtttttattttacctacatgtactatttagcttcagtgtactagtcctgccacctgtgtatttttagggtgctatggaaataatgaaaagaaacggggatttcagaagaaaattgtaaccaaattcatactttgtataatttttgatatcatgatcacaggtgattcacacgtacacacataaacacacccaccagtgcagcctgaagtaactcccacagaaaccatcatcgtctttgtacatcgtatgtacaatgcaatcatttcatactttaaactggtcaaaaaactaattgtgatttctagtcttgcaaagctgtatgtagttagatgatgtgacaacctctaatatttatctaataaatatgtattcagatgaaacctgtatattaggtgttcatgtggttattttgtatttaaagatcaaattatttgactattgctagacatttctatactctgttgtaacactgaggtatctcatttgcccatgttaatttttttctaaataaattgacaaaaacaaaggtt

SEQ ID NO: 1636 - DNA, 3222 bp, Homo sapiens
atgaattctatggacaggcacatccagcagaccaatgaccgactgcagtgcatcaagcagcacttacagaatcctgccaacttccacaatgccgccacggagctgctggactggtgcggagacccacgggccttccagcggcccttcgagcagagcctgatgggctgtttgacggtggtcagtcgggtggcagcccagcaaggctttgacctggacctcggctacagactgctggctgtgtgtgctgcaaaccgagacaagttcaccccgaagtctgccgccttgttgtcctcctggtgcgaagagctcggccgcctgctgctgctccgacatcagaagagccgccagagcgatccccctgggaaactccccatgcagccccctctcagctccatgagctccatgaaacccactctgtcgcacagtgatgggtcgttcccctatgactctgtcccttggcagcagaacaccaaccagcctcccggctccctttccgtggtcaccacggtttggggagtaaccaacacatcccagagccaggtccttgggaaccctatggccaatgccaacaaccccatgaatccaggcggcaaccccatggcgtcgggcatgaccaccagcaacccaggcctcaactccccacagtttgcggggcagcagcagcagttctcagccaaggctggccccgctcagccctacatccagcagagcatgtatggccggcccaactaccccggcagcgggggctttggggccagttaccctgggggtcctaacgcccccgcaggcatgggcatccctccgcacaccaggccgcctgctgacttcactcagcccgcggcagccgctgcagcagcggcagtggcagcagcagcagccacagctacagccacagccacggccactgtggcagccctgcaggagacacagaacaaggatataaaccagtatggaccggtctgttcctctttccagatgggtcccacccaggcgtataacagccaattcatgaaccagcccgggccgcgggggcctgcctccatggggggcagcatgaaccccgcgagcatggcggctggcatgacgccctcggggatgagcggccctcccatgggcatgaaccagccccggccgcccggcatcagcccctttggcacacacgggcagcggatgccccagcagacctacccgggcccccggccccagtcccttcctattcagaacataaagaggccataccctggagagcccaactatggaaaccagcaatatggaccaaacagccagttccccacccagccaggccagtacccagcccccaaccccccgaggccactcacctcccccaactacccaggacagaggatgcccagccagccgagctccgggcagtacccgccccccacggtcaacatggggcagtattacaagccagaacagtttaatggacaaaataacacgttctcgggaagcagctacagtaactacagccaagggaatgtcaacaggcctcccaggccggttcctgtggcaaattacccccactcacctgttccagggaaccccacaccccccatgacccctgggagcagcatccctccatacctgtcccccagccaagacgtcaaaccacccttcccgcctgacatcaagccaaatatgagcgctctgccaccacccccagccaaccacaatgacgagctgcggctcacattccctgtgcgggatggcgtggtgctggagcccttccgcctggagcacaacctggcggtcagcaaccatgtgttccacctgcggcccacggtccaccagacgctgatgtggaggtctgacctggagctgcagttcaagtgctaccaccacgaggaccggcagatgaacaccaactggcccgcctcggtgcaggtcagcgtgaacgccacgcccctcaccattgagcgcggcgacaacaagacctcccacaagcccctgcacctgaagcacgtgtgccagccgggccgcaacaccatccagatcaccgtcacggcctgctgctgctcccacctcttcgtgctgcagctggtacaccggccctccgtccgctctgtgctgcaaggactcctcaagaagcgcctcctgcccgcagagcactgtatcacgaaaatcaagcggaatttcagcagcgtggctgcctcctcgggcaacacgaccctcaacggggaggatggggtggagcagacggccatcaaggtgtctctgaagtgccccatcacattccggcgcatccagctgcctgctcgaggacacgattgcaagcatgtgcagtgctttgatctggagtcatacctgcagctgaattgcgagagagggacctggaggtgtcctgtgtgcaataaaaccgctctgctggagggcctggaggtggatcagtacatgtggggaatcctgaatgccatccaacactccgagtttgaagaggtcaccatcgatcccacgtgcagctggcggccggtgcccatcaagtcggacttacacatcaaggacgaccctgatggcatcccctccaagcggttcaagaccatgagtcccagccagatgatcatgcccaatgtcatggagatgatcgcagccctgggccccggcccgtccccctatcccctcccgcctcccccagggggcaccaactccaacgactacagcagccaaggcaacaactaccaaggccatggcaactttgacttcccccacgggaaccctggagggacatccatgaatgacttcatgcacgggcccccccagctctcccaccccccggacatgcccaacaacatggccgccctcgagaaacccctcagccaccccatgcaggaaactatgccacacgctggcagctctgaccagccccacccctccatacaacaaggtttgcacgtaccacaccccagcagccagtcagggcctccattacatcacagtggggctcctcctcctcctccttcccagcctccccggcagccgccacaggccgctcccagcagccatccacacagcgacctgacctttaacccctcctcagccttagagggtcaggccggagcgcagggagcgtccgacatgccggagccttcgctggatctccttcccgaactcacaaatcctgacgagctcctgtcttatctggacccccccgacctgccgagcaatagtaacgatgacctcctgtctctatttgagaacaactga

SEQ ID NO: 1637 - DNA, 27079 bp, Mus musculus
ggaaccaggcatggcaggaaagccaccctggagagcccctgccaggcggcccactgcttctcagcagcctcactgtgggtgagactctgtgggatcccacgtcctgtatgacttgcccagtttatcagcacccgggcttctgctcagtgctcagcatacgcctatttctcctgagctgtgtgtgctgatggtttccatgctggggagggtctgtgaggaggtcctgtgaagaggggaccgggagctgagggattctaggcaggggctctaccactgagccacgcccccagcccctcactgggggattctaggcaggggctctaccactgagccacgcccccagcccctcattgggggggttataggcaggggctctaccactgagccacgcccccagcccctcactgggggattctaggcaggtgctctaccacagtgctacagccccaacacatttctgctcaattgtgataaccaaatctgtgtgttggcattcattgtcagatgtctaggacccaaatcaccttgaatgaaacccaccgggcaataggctgggccctgcagacagcaaggaataaggtagccctggctacggagtgggaggagcttcagaagatcacctcccttccatgttagcctcggctggtctctgtcaccctgcggcctcctgtttcctgttttggtgaatccctgagccacctggcaatgccaactccaacagtgcctacacctcctgcaagactaaactcttcctttgattaatccctcctaaggaagcaaggaaagacaacaaaagctggtctaggcagtttcccagcccttacagctttctccatcttaaggctccaaggacacagacctagaggctcaggtgagcacactgactaacaaggacttgccatatcccgcatttacttcatctgctgtgccttccctgggctcgcaagcctgctgtggctctgtcctctcctcccaggtggcatcacggccctggactttaggctccagctcatcctggtttctattgcattgggtgctaccttcacccatgtctaagcatacaacctctccagacaggacaggacccctctgcctgccccaagtgtctagtccctatgatgggtcaacaagatgattcaacaggttaaagtgcttgctgccaagcttaaagacctgagtttgatcgctgggaccaccatggcgggaggaaaagccaactcctgcaagttgtcctctgatctccacatacatacatggcatgcacatacatgtatacaagtaaagagatctaaaaacaacaatttttctttttaattcaccacattaagccaagaacagtgcgttcatacccatgatgaggctaacccatcactcgggaaatctgaggcaaaaggattgcttcgaattttaggctagcctagggtacatctggagacctgatatctgagttaagttaataggagcgaatgagttggcatggacaaagtacctgctgtgaaagcataagagctttaacccggacccctagccaggtcccgtggcatgcgactcacctgcaatcctgaggctggggagggcgtacaggtgggtccctggagctcacagatcagccgctgcagcccaaccggtaagctctaggtttagtgagagaccctgcctcaaaaagtaaggggctgagggatagagaaagatacctgatatagatgactgtcctctacacatgaattcacagatgatctctctctctctctctctctctctctctctctcgctcgctcgcacgcgccacgcgcgcttgtaagggactgtgatggacgaatgggtgaagcagaagggagcatgggtgaggcagacaggaaagtgagaagtaagcagagcccatcactgactctctgacgctgtgctgatagcttgtctctttggaggtgtgcttgtcattctggtacagagccccccaccccccagccctttccacaccagcctggatgatctcagatgccatttctatttcatccttaggaaggtgaagaaagctggcctcatggtaaagacctgacatcccagttactcgagggatggaggcaggaggattgccagttcgggaaacagtgagattctgtctcaaaataaaagtcataagagggctggtgagatggctcagtgggtaagagcacccgactgctcttccgaaggtccgaagttcaaatcccagcaaccacatggtggctcacaaccatccgtaacaagatctgacgccctcttctggagtgtctgaagacagctacagtgtacttacatataataaataaataaataaatctttaaaaaaaaaaaagtcataagagagctggaagtatggctcagtggtagagcccctgcctagaatcccccagggaggggctgggggtgtggctcagtggtagaatatctacttagcatattgagggtttaaattcaactcctattatttagtactactaagtaatatacaaataaaacaaagaaggagaagcatcagatcacgttcctgaggaagagcttacagggagagactccatcattcagtaagcagagtcctatttgagactctgactatccaggccagagcctcctcccactgtctctgggatcctattccaccgccttggcatggggtcacgaccaggaggctccagaaccactgggctcacccctgcctgcctgctgcaactgcacaagctagccattcttgaagaaacaaaggctggctgggttgtggtggctctggcgtctccctggagggtgtctggcctctgcaggatgttggggagtggatctgggtggtggttgaactctgtcactgggtatcgcaaatcacattaagccagcccttcacccctccatgcagtccagctgccctctatggtcatagggctttcagtcagctgcttaggcagggatgcttttggctcccgggcagttgagttctccccatgctgtgcagacccttgaactcctgtgcaatacctgtgatactgctccctgcgaagagttcgtgaaacctagtattggtccccaacttcctccttgagatttgtgtcctgggccagctcagaagtcagtaggtgtccctgacacaccttcttattcccaagaccttgtccttggaggacaaggggcagcagactgagtccttaccccttcgcatgtgtgcatgtgtgcatgtgttcatgtgtgctctgccccctgacacctgatacctaaccattactcctacagtagacaccaggctctgctttaggcatgggctcagccttgatggtttctgctctcatagcactgacatgtggcaccttcacagatatccatatatcctttctagtgtctagccatccactgtttgtttggttggttttggtttttcaagacagggtttctctgtgtagccctggctgttctggaactcactctgcagactaggctggccacgaactcagaaattcacttgcctctgcctctcaagtgctgggattaaaggtgtgtgccaccactgcccggcttccatctgttgtttacacatcctcttaccattcatctatctatgcatccatccatgcatctacccatctatgaaaccatccatttgacatcccatatgtccctccatcctctcacccatctaccgtactgtttacacaacctctaactcattcacccatccaagcttccttccatgcatctatccatttatccatccattcatgtatccatccatgcatccatccaacatcccatctgtccccccacccacccacatcatctacacatcctcccatgcagcagactacccatccatgcatttgtccattatccactttacctacccacccatcccatccatccacctcccacacattccattcacacacccccactccatccattccccatcacctaattgctcattcatctattcacacatccactcaccctcccacccatctagccaccccattcacgcacctacagtctgtctgtccatcctctaccccctgtgcagcatgacccttgaaccctgctttgtggcagatctggatgagaagtgaaatgttacccgcctccagggagggtgggagatgaacaggctgttcttgtttaccaagtaagtaagtaagtaaataccaagaggaggggttacaagggctgggaaaggggaaccatttagggcttatcaggataccccaaaccagagtgccccctgaagttttgcccagccacttggtcaaaggaaccagactctaacccacactggggtccaggatcaatcaagcaactgggtccatcgaactgtgcctgcaaagcgccaggacggaaggcgccagcgccgtccctattacagagtagagtgaagccctcagcctacagagagtcgggaactggcccaggaccacacagaatgtggcagtggtgaggggtactgggaggagcgggcagagcgggcagatgggtggatctgcatggggcggctgtctcttgcagctggagtctgtcgaatctgttctcgggtagtgcccaccccagttgatgggaatcagctgctgtgttaattctacccttgtattcctccatgcttttgcctctgccctccccctctccccactggagctggctgtactgaacttctagccaaccccttcccttcccccttctgccaggagtgacagaaccttctgtactgagcctcaccgggccattttgattgagccccgtctctgctgtatgtgtaccagatttaaaaaaaaaaaaaaaaaaaaaaaaaaaatcccagccctacctcattgtactgccttgcagtggctttagggatacatttatccttgggcatgtgtgtatgtgtatgcatgtgtgtatgtgtgtatgtatgtgtgtatggcacacaggtacacatgtgtgccagtagagaccaaaggtctcaacctcagattttgcttttgtttggtttggttttgttttgagacagggcctctcactggactgaatcaactcaacgggtaagcaagggtagctgccagtgagccccgggaagctgcttgtctctaactcctcagtgctacgattataagcacacacccatcatgcctggccttttatgtggcggctggacattgcacagtaaacacttttgccaactgaggctatgtcccctacttttggtttttttgaaacaggatttcatgtagctgaggctggccatgtttttctgattctcctgcctctgccttttaagtgttgggattacaggtgtgcaccaccatgcccaacctccctggcttccactgccctgctaagggagggctggttcccagactgccagctccaagaggtggtgggtgtgggctgctttggatggcttcctgctgagttaatagttcacgtatttggtctccatagatcttcccaggaccctgcatgggagggcaggcaactgtcggggcctcaagacaccaggaggagggtggtaggcagatggccagttccaacaattcccaggagactacaagactaggccagggaagaacctgtgtcctcaggacttcgtgagtttgacgtcagctggagagccctggctcattctacaggggtactcagtttcaacagtcacttgggcatctaccaaccagggactggcatagtgaatcagagtgcaaaaactacaccttgagtctgagagctggcacccttacctgctctgccacaaaatgacaggggacccaactaggtccccgatgtcagtaaaaaaggaaaagttaattttagtgacttgaaatgaaagctgtgactcaagtcacattaggggacatcaaacatacaagattcaaatcctgctcagtgagtgtgggggaaagattgtatatgggttctgattatagagagggaaatgacatggaaaataaagggaccaaggggacaggtacccagtagcgtcagaaaaacaactgtgaatgtctcaatatgtctcctggcatgacaggtaaataaagagtttctctggaatctataatatgatggtcacatcctggatagtttcttgttctctatgtctctcccctctttgttattttattttattttattttatcttatgtatctaagtacacactgtgtaggttcagatacactggatcccattacagatggttgtgagccacctgacctggaagcttctatatagaccaggctggccttgaactcacagagatctgcctgcctctgcctcccaagtgctgggattaaaggtgtacatgaccacactaggcctgatgctctctctccctttaacatcatccatggcccactagccttctctccagcttcaaggtcagtaaaatcccaggactgtaaggaaaaggaatgaaactgaggcccaagaactcacagcctcagagagggtttggcttagcagtagagcccctgcctagaatccctcagtgaggggctgggggcgtgactcagtggtagaacacctgcctagaatcccccaatgaggggctggggcgtggctcagtggtagaacacctgcctagaatctcccaatgaggggctgggggcgtggctcagtggtagagcccctgcctagaatcccccagtgaggggctgggggcgtggctcagtggtagagcccctgcctagaatcccccagggaggggctgggggcgtggctcagtggtagagcccctgcctagaatcccccagtgaggtgctgggggcatggctcagtggtagagcccctgcctagaatcccccagggaggggctgggggcgtggctcagtgggagagcccctgcctagaatcccccagtgaggggttgggggcatggctcagtttagagtgttcactgcctgcaccctagtatttcccctcccagaactttttctgaggaccctaggggcttcccgaatatcctgatcttccctctctagctcctcattttctgtcctgggatgagcgccctaccctcccatgcccagtgggtgtctgcagggagtccatgggtccagaggaagggagtaccccatgagctcagtgcaggaagcaatagggagaggcgagctggttatgtctccctctggttttcagacctcaaggaggaaccacgaaattccaatcttctgacagcgaagaaactgaatcactcttgccagagcctgcagcccccacaagaatgcggtaaggctttgacctgccgttccctgtccagccaccacagtcagagctggttggttccttactccatggccgacccggtctcccctgcatggctcctctgtggcaggcatggacactgcaccagcccctctctgggcatcaggttgctttctttacaatggggaacatgaggacttggtggtagcggcttgacatggtcccaggcttgggatgaaggcgcaccaagactgacaaccagctatgacttggtcaggtgggtatggaaggaaggcataggtagtttgtttcctctcctgccgtcagagacttgataaatgcccacgaaggtatcttccctttggtttaaatggaagccatgcagaaagttagggtgattaggggacttgagctattgggaaatgaagacattgtatgtgcggggtggggggacacggggtaggaccaccacaagacatgtggataccaggagagtcttgaattcataggtgacaacagagagtcatgctatagtctattctgtgtctgtgtttgtgtgagagagagacagagagagacagagagacagagagacagagacagagagacacagagaaagtagaatggaggctgccaagtggtccaggagaggggtctcaaggaggagccttagacctaaaacactcggaagacacatagatagtttttggtgggaatggattagcccctgaggctgaggctggaactggggtgagtttatttggagagcagtccagcagatagcaggtaggactttttccttgtccttgagggaccaggctctggcaggaggaggaggggtttatagcaggaggtgacgccatgggagctttgtcactcgggcacagccagcaccatctgcttaggcatctgcctaccagaggtggtgcctcctaattacctggggggaggggtcaggaagaagcctgggaaccaccatatcccactccctcccaccacagaggggttgcagtgtcccacagggccctcagagcaaatggaccagagatccactcctgggtggggtgggaggctggggggtggggtggggtggggagagccctggctacacatcaattcaaagtcattttattttatatttgtgatagggtctcatgtagctcaggctggactcaaactcactatttgccaaggaatatttggtgcagagatgaaccgaggcgtcatacatgctaggcaaacactttaccaactttgccagatgaggtacatttcaggcgctcttttacacggcagcaggggctgacccgatattcactctgtaactcaggctgcctttaaatgttcagcaatcgtccaagcctgctacatgggctatcatgtctgtcttcattttgaaaagaattttgttgaaagcaggtgtgcgtatgtgtatgtgcgtgcgtgcgtgcgtgtgtataaatgtgtgttgctcaggccaagttgcacgtgtggaggtcagagggcaacatattgttggttctttctgaccatgtgggtcctgggaaataaactcaaatctgcctaggtgacagttgcgtttgcccactgaaccatctggccagcccctgcagtaagtctttacctgatccagcctgatgccttcttttaacctccaagagagggacggacattaagaagagtgtagtagagaaataattagaaatgatactccggtctaaaatataaacgctagggagtcggcgacagaaggaacagcagtttatccgtggtggcagggtgggctcagacttcctttgaagggggacgcggaaactgaagccaaccagacccaggggcagccaggcggagagccgcccccagctgcgctcccggaagatgcagcaggctcgggctcggaccctgctcccactccaggggacccttggccatttccggacccgtagcctctcaccctaccattaggcgcacattcctgccgcccccgctcgtgctaggcgcaggcaaggcccccgcccgtgggaagggggccgtgtgccggggaggcgggtctgggatggcgcacagctgggtcacatctggtaggagtgcggaggaaccaaatggaacagaaggtagcctttcatccttcgaggaaagaggctgcttgagtgtctcctcgctacggggtgcctgaggtttttggggaccaaccctccccatttaggaacatgatgccaagacaggcctgcctgggggaggagggaaggatggaccgacggagggacgtagaattttgtcactgatacccttttgcctgaacttcaggtccactcctaagacataagtatcagtaagggcagctcaaaattaatcgctcaggacacactgcaggctaccactttggctcagtcagcaccgttccccagggaaggaaacccgctcggggacaggaaatgcacagcgagaagccaaggatgtcgcccgcggaggagcactggccctatcacccaggtcccagcttcgggggcgcgtcctccacgtgcagccgtggcgggcgttggtcaggctgggtgtctcccagagcagctccggagggtgactcggcgcaggcgggacaggctcgtgcacaaagggggcgggtgccgtgggtaccccagctgggtggttcccagccccttgtccgtatcccacgtgggaaggagagatctccctaaaggttacgccccaaggctagcagccaattagcgcgtggaggcgtggcgggcaggggaggtttaagagttcctgaagcgagaggcgcgcagctggaccgggagcctcgggcagccggaccagttggcactgggatagatattacgtgcggccgccggccaccatgctccagcggtgcggccggcgcctgctgctggcgctggtgggcgcgctgttggcttgtctcctggtgctcacggccgacccgccaccgactccgatgcccgctgagcgcggacggcgcgcgctgcgtagcctggcgggctcctctggaggagctccggcttcagggtccagggcggctgtggatcccggagtcctcacccgcgaggtgcatagcctctccgagtacttcagtctactcacccgcgcgcgcagagacgcggatccaccgcccggggtcgcttctcgccagggcgacggccatccgcgtccccccgccgaagttctgtcccctcgcgacgtcttcatcgccgtcaagaccaccagaaagtttcaccgcgcgcggctcgatctgctgttcgagacctggatctcgcgccacaaggagatggtgagacccagcgcggcctgggcagggggatgaagtggggatcaccctctggtccaactggtgactgacgatagcggttcccgatgcgttaattgctttgggtctatctgggaaacgatgacactgataaatcccattacagccccgtgtggctgctggggttcactttgccttactaccctggaagcttccttccgtgttgcccagggtcaccccagccacatgctctgtgtctggatgagtcgcctccagcttagggctggctctgtaacgcttctcctaaacactggagtgaatggccatatttgttcctaaactttttcgagcaaattggctcagttccatcctgggtccccttcactccccttccttcttcctgggtggaaggtacgcccccttgaaagggagggaggaaaaggcatagcacacccctggaccaggcaaagtgaaagaaatgggtgctagttctccagacttgctcagaaccctgacttcagtagctcagctcccccacctcctgttagaccaacttcatacacataataaaaagacacaccccactttgaaaatctccctggaggctacaacaggaccgttggggcgggagagcagagtgcactgcgtgtgtgtgtgtgtgtgtgtgtgtgtgtgtgtgtgtgtgtgtgtgtgtgtgtgtaggggtgggggtagatatttggtgtgaagactaagactcactttccttcctgacccagccccagtgagacttcgctttaggacagtggaggttaagaggacaggctcctatctagtcttggtcaaagaggggccctgagaaccccaccgtagcctcctgagaatgaggcgtccctttcccaggggctcagcaggccttcgggagggggcagcggggggccatgggttttgtttggctgtggtgccgttaggattcccagcgctaggctgctctcacgccggccccttgggcaaggcaacaaagcccctttctccagccgagaaaggcgtcggcctcttgtgtacagctatgcgctccatgggaaccgttggctggcgtgctggccactcaggttgcctggtgatgagggggcctctgtgtcctccccccagccctgaatgacagccctcgtggggcacgatccctgagccagggcattcccccaccccttcattcagccttcctgctgtgtgatattggatagcatctatcccactctgggccactatcggttctgagaaactcttattcagggatttgggactcagttggactgtgtggtctggtgagaagcctagggtctctctgatcctctcttgctctcagaaaagggaaatactttctagtgaggtattataaagtggactgtagaactttggaggctcttggtgatcccagcagtcattctgaataagggggccccctacccagaaaatgctgcatttactgccatgctcacctcccgtgcacatgacaggcaaagcccccctcttgtgtgctatgatcaggggctcttggaacctgtagcaaagggcctgctcccctgtctgtccagggcggctgcagtctgatggaaggtgagagaggctccattaacctggattggggatgaatggaaggaaggcttcctggaggaggaggttccatctgcatcagagtcctagggtccaggaagggcaatcttggcaccaggcatgactgtggggctgtacaaaaaaaccaagcaggctcggtgaggtggagaggctggtcaggggtacaggcagagcgcctggcctctggcccgctgctcctcccccaccactaaggagcgcgccaggctgcaggctgccaccgccacagccacaatggctggggcagaacttggcatcctgtgtttctttgaatctcggttccaggaacaatgctgcttcctgtgtgtctctcccccacccccttgcttgccctcaccagctctgctgcccccctctgccctgtccgtcctccttaggggaagttggtgggatggggacagactgagatcagggtctcccattacttcttcctgagtgtggccacaggccagtgtcctctctggtctcttaactatatgccaaggagaaaagaagatggtactcacttcccagggacacttgggagaggagagtccatccctagcacttggctgtgcacaggcaagctgtgttgtgcccattttacagagtttccggtggactgagtgatacccacaggtacccctgcccccctcctctcctgtggagatacaccaggcagaatacccacacaccccacactcagcctctcaaagactgttctctgggcctccccccccccccaccccccaactgaacaaaggtgactttaatctccgtagccttgggctgggtttttaggacaccatcgaagcgcgggagaacaggcctctctcttgatctcattaagaaagcattttccttttaatccagcagcagcgtctgcacaagccggccctctgtacctcccacggcattcctgggctgagatgctagggtgcgggggggggggggtgtgctggatgcaagcgagtctgtgcgtgtgggctgccccgggtgtctgcagagacctggaaggagggggtgcatacttgcagatgatatagatcccacatttcatctcctaacctgggcttcactggagtgagcatctgggtatgggatcagcctgggtaaaggagtaaggctgctcgaggcatggtgtgccacccttgtagacctggggtttcttgggtggctggctgggtacatgctgacctccgtgtttgcatgctcacacccaggtttccttgggacccttttgtgcacaaaagcagagggaaggctggtggatgttggggagcctgctgcctctgctgtgagcagcccccaaccgccctagggttgcactctgcaatgccagggtgcggcagtcggcacgcgctgggcgggccggcggaggaaggaacattccttcccgtgtgccgacgggcccaggcgggcgccggcagctcctggccccgccccggcgcccccctcctcttccgcagtgcaatcctggcagggggtggcccagcgctgggccaggtggagtcttggctgtggccctgggcaaagccttctgtaagcggggaacagttttcctctctgaagcctcacccggctgctcagataccccagtgggcctggagacatgaatccttttctgctactaccatgttgaccgccgtgacctcccagaacctgactgggtgctatggctggggaaacctcttctatggggcacaggaggaagtccaggccagagtcgcgagcgaccaatggccttaccccatactcccgcgcacaggacctcttgcccagccggcccagttaaccaggccagctgtatggaaatgacagcccggccactcctgcttaactcggcagagttaaggctggcccagcccaggacaaagctggcggacaatggctggtgattcatcctcccttcgggtccctttgtctgccagggcttggcagcggcccagcagaggcctttgtccccgacccgagtgagtgaggctcagcttcccaaagccgacctcctcctcctgtcccccgccccctcccacagcttggaaagcctgcaggctgggcgggctggcaggctgtgtcaataagggtgtgtgccccgccaggtgcacaggttggcggagggttagttgaagcccgtttacctggctggtggggggggcatcccacctggctcgtgcctcccagctgcctgtggtgaccttgggcccacctgtctgaagttggagagtgagcccacctcccccagccagccagcccgccagtccagctgccactccccctgggcacttgagcacacattctgtgtgcagtggagaattcaggcagttcagtgcagggtgggggaggagtctagattgggtgccttggctgtggtcctcgtagggcactttggagctggaaggctcaagatcctgtctcttcttccagacgttcatcttcactgatggggaggacgaagctctggccaagctcacaggttggtcccaggcttgggggtggggatgagggtgggaggcgctggtcccaagcaacttcttcccccgaggctgtgaggtcactggctgccgcctcggggctaagaggccagttcactcggcttgtttgcttcatgccccgccccaccactccccgggccccgattcttatgcagaggagaccctttcagtcctctggggaccctttgagtcccgcttagcagcaacaggtggcgggtactgggggaaaaaaaactggctgaatgaatgggcagcggtggctaccctggggagggggctaggctgggcagggctggggctaaggttcgaagcaatgagaaatgcctgccgcttgtgcggaccaggcctgcttacgggccctccccgtccacaggcaatgtggtgctcaccaactgctcctcggcccacagccgccaggctctgtcctgcaagatggctgtggagtatgaccgattcattgagtctgggaagaagtgagttcctacctttccctctgtgccccatccgtgccccttccctggcagcccggcagccctcgacccctgtctgcagcccctgacagcatccctcccgccttgtgttcaggtggttctgccacgtggatgatgacaactacgtcaacctccgggcgctgctgcggctcctggccagctatccccacacccaagacgtgtacatcggcaagcccagcctggacaggcccatccaggccacagaacggatcagcgagcacaaagtggtgagtgtctcccagggtagcacacaccctgaggtgttagggaggggctgagccacctttgcaaccaggagtctcctgacagcccttgtttcacttcacccagagacctgtccacttttggtttgccaccggaggagctggcttctgcatcagccgagggctggccctaaagatgggcccatgggccaggtgagtgtcccctgcctagttgccactacccctgacagcagactgttcctggtgctcgctcttggtcctgggttccctgcagcagcagcgtctggcttgggctattctctccctgccttaggtagctgtgttttctgccactctctctacctctgataaagtcttcggcatggaaggactctggctcatggcggggcggggcatagtggactccctctttttggggccagtttggcaaagtcttgtctactcatggcccagctactggcttcagcctctacttactcttccccgggcccttcccttgcagtggaggacacttcatgagcacggcagagcgcatccggctccccgatgactgcaccattggctacattgtagaggctctgctgggtgtacccctcatccggagcggcctcttccactcccacctagagaacctgcagcaggtgcccaccaccgagcttcatgagcaggtgcgcatgtggcccccaggcctgggtgaccaagcagagaactcaacagttgagggacagaagggagagggtgcctccaaggaagggacaatttttatctatttatttattgattgattgattttggttttctgagacagggtttctctgtgtagctctggttgtccagaactacctttgtagaccaggctggcctcgaactcagggatcaacctgcctctgcctctgagagctggattataggcatactgatacagggcttcactatgtagcccaggctagccttgatcctcttgctgtagccccccatatgctaggaatcagctgtgtgtcaccacacctgattcagagtcgtttaggggtggggtgtatgtatgttttcatttatttatttttttatttacttagagatgggtctcttatagcccaggctagccctgaagttgatatgtagttgagaatgaccttgaattcctgatcctcctgactccactttcctgggctagggttgtaggagtgtactaccacatccagtttatgcagttagttgggctagcccagggtcactgttttaaatagggatatcagagactcctcattctcaggtgtcacagcctgctggtccacatgaggtaccccagtttcactctctagctcctccaaaacagaaagtcaaatagattcttctaagttgctgatcatgccctttgaggggacactcttgctctgtctcccttatggtcgtaggccccaccatgggcttcatccccaggtgggccgagccagtgtccttggctcaagggacagcagcaggaatagccaggcaggactgccacctctccagcatcatcctgttgctcccaatgcaggtgaccctgagctatggcatgtttgagaacaagcggaacgcagtgcacatcaagggaccattctctgtggaagctgacccatccaggtaagaactcgtagagggtcaccaagtacccccggggttgggggggtggcaggaaccccatggttgggactgccagagggcccatggcacccccagcccacgcagaccagtctttactctgtcccaacaggttccgctctgtccattgccacctgtacccagacacaccctggtgtcctcgctccgccatcttctagcagtcgtggttgaaactctgtccctgggcgcccctggtatccaaagggcccagggacctttattgtatgccctggccttggtgtccgaggctcttcagggctatgtgtatgtgtgtgtatgtctatatttgtgtgtttgtgtggcgtgcccacccgtgttgcagactgctgggcagtcgtgttcttcagggagtggcaggtctgtccctaactacactctgagcaccactccgagggcagttgtgtgggatctgtgtttggatctctgcagtgggggtgggtgaggccttggggctccactcaggggtccgtgggtgctgattgtagcagtctcttatgttggggtgctagcacctatctggagccttccctgtcagctgagctgtgcccagtcctagggaagctgatttgggtagtaaaggcctggaccccttgtgagctctggcccgggcgctgcctggtgccattctggtgaacaatgctcccccaccccctgccctccagggtggaggcgaagtcttcagccccaccctctgatgccctatctttgtctcccacaccaagtggggttcagagctatgaattttatctcctctccaaagtagagagaaagtcgcccatagtgggtgtgcctgtacatattgtgacagtatttttttactgtgctctttcttgaaagggtcacccccaccacccccaactcctcactcccctacccctgggctgtattctgtgttctttttgcaaagaccttaactaggcaagctaatgatgataagggaaaagctctcagggaattgatgtgttgttgctatggtgacgtccttcctctgaataaaggtgctctttgcagcaacccaaggggccctagtcttgcttgggagttggggctaagccacctgtccatcaaggtaactcgaggggactttcagatgagggcaggggagacccagtcatgacatagagaagaaggcaattggtaagaattcagcaagttagccgggcatggtggcgcacgcctttaatcccagcactcgggaggcagaggcagggggatttctgagttcgaggccagcctggtttacagagtgagttccaggacagccaggactatatagagaaaccctgtctcgaaaaaccaaaaaaaaaaaaaaaaaaaaaaaaaaaaaaaaaaaaaaaaaaaaaaagaagaagaattcaacaagtttacgacttgggagggaaactagtgttaaaatagatgaagtatggccagcttggtgtagatgtgcctctgatgggttgataccatgttgggaggtgggaattggacagggctgatggcggtagctgcttgatcaggtcatgccctgtgtcaacctcactgtgtccagacctttctggaggaggtgcagtggctagtgggggctggccagagacccattttccagacaggaaaactgaggctcaaagcaggctaaatgaggatgaccaaagtcaggcagccaggctgctgaggtggatgacccccaccccccctagatcttcgttccctgtcaactctgctgacactgcctggcctctcatctgtcatgagatacacctgtcatgtatcctctgaggatgggcagtacccaggctgctcactcgtgggtagagctggcgaggactcggatctttctgaggctcttcagggaccttcctcaaatccagccacagaggctggctgatcgggggatcctcaccacactccttccctgtggtctccttgtttccgctcctttacagagaagcaggctagtgctgcccacctgctgcccttctgtaggtggctgcctgctctgacctgaccccggactcacggggctaggtcctcattacctgccacccctgtgtcctttgccttcttccccacaccatttgattagagatctgtcctgcactccaccagacattgctcacagctgtgggttcagcacccccaagtgggctgggcatggcccttgctggtaactgctcttgccttgtggggtgactggccagagcctgaccccaccttggctttgtagtttggctttttaaggcctgaggcagctgcctgggattttcagagtaggggatccccagtggtggccgtggtccttggcatacagggcctggtggcggtggcttggggccctacttctagatgaggaagctgacatttgtaagggtggaaaggtcacggtggagcagtctgcacacgggccatgagcctccttcctgcctggatgagtcagaggcctgctaccctctgctctggtcgtcaaaagccccttgcagctggcacagagctggcagccacagaggtgtggtacagcggcaccaacctcgccgccggcatggagctgggggccccagccagggtgagcttcccattctgattggagccagagggtggtcctgagcctggagggcagaacctcagcacggagcaggaggggaacccagtgaggtggcataggtctctaacctagtattattcatgaggctgttgaggtaggaggattgtgagggtcgtgagatcagagccagcatgggttaccaagtgaggtcaaaaaaatcatctaagaaacagaagccaagtagggagggcccaggaagggtctagccagtggcttcaacaactcccaggtagagcaggcggaagagtttctcctgaggagggaagcaagctgactgactgactgactgactgactgactgactgactgattgattaattgattttttttcaagacagaatttctctgtgtaggcctgcctggctgtcctggttgatctggaactcagattcacctgcctctgcctcccaagtgccgggattaaaggcgtgcgccaccaatgactggctgcctggccgcctcagtgagggtcttagcgaggagccctcctctctggtcagttactcagtcaggtatcctgtcctggggcttccaaaagtttataaaacgccaggtacactgatgcctcgtgcctgtaaatctcagggatggggaggcagaggcaggaggatcgccaagagttcaaggccagcctaggctacctactgaatgatgctcctcccctcccagctctcaataaaagtaacactgcacaccacgcaagctctagggtgtcagggagggtgcagaagcaggaaggcacccagcttcctctctcgagatgagctgggtctgggagagggtggcagggtagggttgaagctttcaacttccctctctgaacttccctcccctctggggtcagcagggctgacttcctggaagaggtgcctcactgctggagccggaaggccaaaaccacagcgtgtgagcagaagtcagcatgtgtttgtgggtgttcaagcttggcacagcccagacaaatgcaccccagggtggggtttggagggacctggtgaggagaaggctgggaagggcagtgagcaaagccatttcgtctctccctgaggctggacctctgatggtagaagtcagagcccgctgggtggcttcagcctctgttctgggcctcatgaggtctcaagaggaagcagaaggccctgggcagacagcaatttgtcagacccattggcctagcctgtggcacattctcctagggccacctgaccccagccttgacctctcccccaccaaaacaacaaaaaaaatttatcttttcctattcatgctcggcatttaatgtttttaaatttttttttttaagttggggctggagagatggttccatgattgttgctcttgcacagcaaggacccaggttcgattcccagcacccacagggctgcccataactgtctccaatcctaggggatgtaacaccatcctctggcctctacagacaccaagcgtgaatggtgtacatacagacaaacgcctatgcatgtaacttataaaaaaaggttaaaaatattgggggttggcatttgtaaacattttttaaaaagatatataagtacactgtacctgacttcagacacaccagaagagggcgtcagatctcattacaggtggttgtgagccaccatgtggttgctgggagttaaactcaggacctctggaagagcagtcagtgctcttaacctctgagccatctctccaaccttgagaaatggtttttgtgtgtcatgtgcaagttaggtcactagacttaacaatacgtaccttagccatctgcgtcatctcagtggtcttttggcaatttttttttattggtgtatttccactgtacacagtaatttcattaagatagctccatttgtcacatgctttgacctattcatcccctctacctctgtcccctctaggatagtcgtctttctgagatagcccacgtgtactttcatatcacacacatacacacacacacacacacacacacacacacacatccatgagaaccgacaatatggctcagtcagtagagtgcttactaagcatgaaccaagtcctgggttcaaatgagtatcacatgaacatctttggatacatagaatccaaggccagcctggactccatcgtgaaaaataagtaagactggagagagagcttcagtggttaagagcactggctgttcttcctgaggatctgaggttcgaatcccagtggcttagaactggcccgatgccctcttctggcctctgccggtattgcatgcatgtgatgcaaagacatacatgcaggcaaaacactcatacacataaaatattaaaataagtaaaataagagggggggaatgtattaaaactaaccagccttgctttctgtgcaattacatatgtaaatccatggaagggaccctaggaccaagaggcaccccatattgaaggttgcttaggtattgtcaagagtttagaggtcccatcaaggcatcatccacttccaccacaacccaccatggtccttggctgccgcctggtggccacagttgataacttcccaccctgggactcccagtgtgagtgccagctttccagagaccctcccccagatctagggctacaaccaggaagaactgcaggcctttgctttggcgtaagttccatgtgatactaaatatattcccttctgatttattggtctttctcccttagtagtgctgaaaatagagccatgggtctcgcatatgttaggtgaatgctcaaagtcctgaatacatccctggccttctaatgtctgatttatgcaataagggagtcaagtagaaggctcatgtgctgtctcgggctgcctatcagtgtggctcaagccgcaggtgccagcacaagcattctcagcagaactaccatccactttcctcctcaacataaacctctgggcattgtggattcagactggcaagtactctcctgatggggggaccagtgcctcctgctggaccctcgcctcccttgaaccttgtttcagctttcacatacagctccctcactgggggcctctaggtaggaccactgagccacactctagcccatcactgggggattctaggcaggggctctcccacttagccacgcctccagagcctccctggggaattctaggcagggctctaccactcaggggctctaccactgagccacagccccagcccctccctggagccatgctttagtacagagctttctgattggtccttggcttctatacgtccttcatcccttcctgactcagcagctagagcaattcagtcgaaatgaatactagatagtgtcactctacggctccttcccagccaattgctcccacagacctcattcagcaaccctgtgtccctagcctgagctactctgtgtacagtgttcatgatgagaatgagagagagagagagagagagagagagagagagagagagagagagagagagagagagctgtttcttaaaattgtttattttaaaacatgaaacccaagctgaatagagaccacagaaattacatggacaagaactttagttatttgccaagaaaaataaagttccccacagaaataaaaatcaaaccccaaacccagtttaaaaaatgaaagcacagcaacagtaacacacagccatggccctacagaggctggaggggaacttggggctggctcgattcagatgacatagtccactgggggcagatgcaggcagagggaccgtaactgggaggcaatctcacaaaatcacatatgggaggaagggtgcggcacaccaccgctgtgatgaaaaacaaagagaccctggtcacctgtggcccaccagctagccaccttctgggccggacagagctgggaccgggtagggcaagctttggagctggggtcaagaattgcataggcttgaaggatgctccaggccgggatcttctgctactcacataaaccagagagtgttggttggggtgggggcctccagtcctatcagttttctcagccagatccctcctcctggctcggcaagggatcgggctctggtttggtggcttagccctccttgttacccaccagagctgtagggtccccttgggtaatagggactggggaccaatcacaggcagctggcactggactgctcactccctggggatgtgggggtggaccactgggattgagtaggtaagtggcaccccagaaatcaggaaaacgaaatgaagccaaccgcagtggtaggagccgtctcctccgcaggggtcagggcgagaaacccctgctttcatttcccctgcttcctttcttcagcctcggtgagtgaaacgtcacagatgggggcactcacgcacagaaggtcaggactcccgagacagcacaagttcacagccacgtccgggcagtgcccgcctctcatgctatatacattcaccttgtggcctgctcacggccagggggcagcatttgtgcttctgagaggccccagggcacacccaggcacccaggcagggataccccaaacctccctccggaccttaggccaggaacatacccatagtgggcaggctggctgcagctgggctgctctggccctggaggttcctggcgccaggccagttggagtcaaggccagggtcccctgcactgatgttgtcgtgcttaggagctacagatgccccgactgggacccctaggccctccgagtcctctgcccactccttttggtcccagacaccagcacaaagaaagggattttggggaaggaaagcaacgtggagcctctcccctctgggggagctgaagcccagggggttctgggatccgtagctgccaggttgctccaggagggccacaggtctgtaaaccactgggtcccagccttgcccctcccaccacatgctgctccactggcccgtagctgcccatctcacagaccagagctcacactggctggctgggccagggtagaggctccaggtcctgatttggaagctaattcagcccagaagcacagcaaacatcacacactaaagccaaaagcaccttaggcaagcggtgttctgggtgtggggggctgaggccacatggacttcagtccccggaccccaggacatgctcctcctggggcagcacctgcctggggaggggtctctaggccctttgagtagcctgtgggtctggcccctccctggcagcaccccacaaagaaatgaccactctagccctggctccaggctagacttagggtcacgcttgctggctcagggtcagccaggagtgcccatggcagctgagagtgaggttagtggttagtcccagcggggggtggggggggccttctgaggctgggggcacattcacagccgtcacaggtccagcccccaaggctgggctccagagggcactgccgcttgtcctgggtgagaatgaaaccgagaggaaagtgggcagtgtcctgcgtcgcctatgtcccagactgccctggagatgacaagtgtggtcagtgcaaaaacaaaggggaagacaaagctgccactcttcaggaatgaatgggaaagagggtttggcaccaagaaggtggccagcactgagaggccagggagtgacctgggctcagcttggcacctgctgtctggggagggctggctgggcactgagggaagagtcatgtggggaggaggtgtaagaagagccccaccctagaggcagctcagaaccaacaggaagagccaagtaagccaggtggctaagggaaggcaggcgccggacgttgcaaagaccagagagtatgaaggggccgttcggtgatgagcaggtgggcgccaggcacagggtcccctgcctgtgaatggagatgggattctcaggagtgtggcggtagggcagtaccaggaaaggctcgctgtagctgtggggagggggacgcccagagtgcaaggggcagcatgaagggtcacctgtagaaggaacgcaggcagggtggaagcacccggcacagagcagggctcagggagcccaagaggacagaagggcaggggagacggaggcaggcagggtcaggttgctggtggcagcgactgtccaggtgagcaccccagaagcctcacttcacaggctggcccggagctcatgctgggcacctccatgcctcctgcagggtgggtatagcgggggggccttcaggtgtgcctagggctggcccggtgtggcttgtggaaggtccagcagggcggaagcagcggtgctggcataggaagggtggggcattggcacgtgggggcagatggctggccggtgtgcggtctagtgcccgctgccgctggagtcggggcgaggctggctcgtggcgaggtatttggctctcatgctggaggtgtactagaggagagagggaaggagggagcagggtcaggtgagttcctaggtgggggctgagcagccagcagcctctttgatgtggtccttggtagggtgagccacagccgacccttggggagagcatggttggcggaatcctaaggtaagaggccactggcccagggctggaccaagggctgagtacaggttagggaagtgatggtacctagagtacaaaggtcagcctctgtagctgaggctggatcacccaggcaagttcccttcccagtgaaggacacccagtccccttctgtcgctaaatcactttcagagtcccagtcagatctttgccacctccagtaattcagctcaaaggctctgaatgcatcacacacgctgagcacaggaaggccacatggaccccatctctatacctctgcctcagagctgtgctggggtcagggcaagggctcccagggcaggcccacaggaagctaggccacagaccacaactgctgagtccactggagcctcctcccctgccattcgactccatcacccccaggaaatgggggcccttcaggctagagtgactctggcccagcccttggatgggaaaactaactaaaggatgtgtgactcgggatagaggtgactgccccattctgcaggtggcctatacaccttggccgccttaacaacagcaccacaggctccaaggtttgggcagtgtgtccacgtgcacgcatatgcacaagcacaagtgtgtgtgtgtgtgtgtgtgtgtgtgtgtgtgtgtgtgtgtgtgtctggctgtctgcctgcttgcctgcctgcctgcagaggaacatgcctccaatcatgtgccaaggccaggtagtgagtgtgcaagagtttgcatgcctgaggcagggacaaaggtcaccagcactcagaagaccaggcaggtggatccccactcaccccaccccagggagcacaggctggctccatagttccccgatgagagacaatgctttctcccagggtcctgagtgctttcctgagacattctaggttaaggttgcaagcggcctatgaggcggccatggtgcagaggtgggaagagcaggggcccagagccatgtcattccatggacatgcagaggtgataaggaacagggggttgggatgggacaactggtgggatgggacg

SEQ ID NO: 1638 - DNA, 1192 bp, Mus musculus
ctggcactgggatagatattacgtgcggccgccggccaccatgctccagcggtgcggccggcgcctgctgctggcgctggtgggcgcgctgttggcttgtctcctggtgctcacggccgacccgccaccgactccgatgcccgctgagcgcggacggcgcgcgctgcgtagcctggcgggctcctctggaggagctccggcttcagggtccagggcggctgtggatcccggagtcctcacccgcgaggtgcatagcctctccgagtacttcagtctactcacccgcgcgcgcagagacgcggatccaccgcccggggtcgcttctcgccagggcgacggccatccgcgtccccccgccgaagttctgtcccctcgcgacgtcttcatcgccgtcaagaccaccagaaagtttcaccgcgcgcggctcgatctgctgttcgagacctggatctcgcgccacaaggagatgacgttcatcttcactgatggggaggacgaagctctggccaagctcacaggcaatgtggtgctcaccaactgctcctcggcccacagccgccaagctctgtcctgcaagatggctgtggagtatgaccgattcattgagtctgggaagaagtggttctgccacgtggatgatgacaactacgtcaacctccgggcgctgctgcggctcctggccagctatccccacacccaagacgtgtacatcggcaagcccagcctggacaggcccatccaggccacagaacggatcagcgagcacaaagtgagacctgtccacttttggtttgccaccggaggagctggcttctgcatcagccgagggctggccctaaagatgggcccatgggccagtggaggacacttcatgagcacggcagagcgcatccggctccccgatgactgcaccattggctacattgtagaggctctgctgggtgtacccctcatccggagcggcctcttccactcccacctagagaacctgcagcaggtgcccaccaccgagcttcatgagcaggtgaccctgagctatggcatgtttgagaacaagcggaacgcagtgcacatcaagggaccattctctgtggaagctgacccatccaggttccgctctgtccattgccacctgtacccagacacaccctggtgtcctcgctccgccatcttctagcagtcgtggttgaaa

SEQ ID NO: 1639 - DNA, 1137 bp, Mus musculus
atgctccagcggtgcggccggcgcctgctgctggcgctggtgggcgcgctgttggcttgtctcctggtgctcacggccgacccgccaccgactccgatgcccgctgagcgcggacggcgcgcgctgcgtagcctggcgggctcctctggaggagctccggcttcagggtccagggcggctgtggatcccggagtcctcacccgcgaggtgcatagcctctccgagtacttcagtctactcacccgcgcgcgcagagacgcggatccaccgcccggggtcgcttctcgccagggcgacggccatccgcgtccccccgccgaagttctgtcccctcgcgacgtcttcatcgccgtcaagaccaccagaaagtttcaccgcgcgcggctcgatctgctgttcgagacctggatctcgcgccacaaggagatgacgttcatcttcactgatggggaggacgaagctctggccaagctcacaggcaatgtggtgctcaccaactgctcctcggcccacagccgccaagctctgtcctgcaagatggctgtggagtatgaccgattcattgagtctgggaagaagtggttctgccacgtggatgatgacaactacgtcaacctccgggcgctgctgcggctcctggccagctatccccacacccaagacgtgtacatcggcaagcccagcctggacaggcccatccaggccacagaacggatcagcgagcacaaagtgagacctgtccacttttggtttgccaccggaggagctggcttctgcatcagccgagggctggccctaaagatgggcccatgggccagtggaggacacttcatgagcacggcagagcgcatccggctccccgatgactgcaccattggctacattgtagaggctctgctgggtgtacccctcatccggagcggcctcttccactcccacctagagaacctgcagcaggtgcccaccaccgagcttcatgagcaggtgaccctgagctatggcatgtttgagaacaagcggaacgcagtgcacatcaagggaccattctctgtggaagctgacccatccaggttccgctctgtccattgccacctgtacccagacacaccctggtgtcctcgctccgccatcttctag

SEQ ID NO: 1640 - DNA, 29322 bp, Homo sapiens
ggtggaggctggagtggggggcgcagctgagaccagaaagaaacagctaggaccccacctgaggctggagacacagccaggacaggggactctccacccagagagacgccataggccaggttgttggggacaggcctggactggtccccaggccccaccctgctgaggcaggccagccagctgcccaccccttggcctgggcatgtccagcttttgctcagtttcccagcctggcagggctttccgaggggttgcagggagaagcaggcctggccaaaagaccgccatgcctgaaggttcaccttcaccccctggcaccaccaaagaccccgcccaggggaagtcttggagcctcagcgcctcagaactttgggacttcctggcatatgggaggcacccggaggtgtgagcctgaggggttcactttcaagggtggctggagacacctgctgctggccatgtgggcctgggaggccttctggggcctccatcttcccatctgtgaaatgggacttggacctagatgctcttcaaggtcccttcttccaagtcttctggcaagagccaagtccaggaagctcagctccattgcgtcggcatctggactgagtactctgtgggtgccgggctgtgctgagggctggacgggacccaggaacagacaacaggtagagtggaggagggagcagcgaggagacttcccacaggggtggagacgctgagcactccaggcagacacagaggggcggctggagtgtggggatcctgggcctggcagggcctggggggttcggcaggcagagtgggccagggggtggcctgaggacgccaggggcagagccagccctcccaactgggcagtggggagccaagggagggtggcagagccgagccccatctctaagatatggggacagccctcagagccagctcccacccagctccagctcaggacaagcagtgggcatggaactgagatgcaggaaggccgaggtctggagacgcacgtgggctccccgaggtgacctaggggtgggcggccctcagccctgcccggagatccctggtcctactgagtcagccaccggggagaagataagggaccgccaggctcttaaggggcctgacgttgctgttgggtgaagtgcccgcccagaatgacctcagaggctgccggggccacctggcatatcaccctgcccgtctccgcagcttcctctggcagtgggtggatgtataatgtccgcccgctgccagagggttcacggcaccacagccctgctgagccctgctgagccccagctgggtccgacctcctgggtaccccagggacggggaggccaggcacgggggttgctgtgcgggttggacagtggtgatggtggacagagccactcccaagagtgttagagacctggggtgggggcatccaggcagaccaccctcaccccaccctgtgggacccagaccagctcacttccctctctgggctcagcttcctcatttgcaaaatgaggccaagagtcacacccggcccggcctgtgaccccggagccccctccagcctcctgcctcactctggcaccaggcctccctgcagcttgcagagcaagcggggtaccgtctccccgaggtgcagcctggggggctgtggcaggtgatgggagcagctgtatttgagggcagggtctgtcggggagccccccagcgtggggagaggaggagggaccagggagtgtaacctggcagcccgcagcagttccggctgctgcttctgtcaatacggccttcctgttttggagattaaaccccggctgagcaaacagctttccaggcggcccctccctccaccccagccccagccttgtcttcaggtcctaaggctgggaccacctggaggctgtgggggtggtgggggatggaggggaccaagctttgccatccctgccctcaccaaggcctggaccacagcctgagcagcccagcccctgcccctgccgcagcctcctcccagccccccgccgtgggctcccccggaacccccccgtgcgatccttccaacccagggcagcctcactgtcctggacgcccggccactgcatcctctgcccttgtgtgacctcctgcaagaaggcgggagcacgccgttcccgggcctcatggccagacacaagcccaccttgtgaggaccccaggcgaggcaggagagccaccgcaagagccccaccaaggcacggccaggggagggcccgccatctcttggatggtttctgcgccgtggccactgacattgagggtggatcattcttggttgtggggctgttctgtgcatggggggctgtggggcagcctctctgggccctataggccagaccctactgtctgttcagccccagcccggtggcgacaaatgaaagtgtctccaaacattcactgtcaggtgtccccagaaaccaagacgagcactggataaccccgtctgggcaagtccctagcagatggcgtgcacagaaacgggctgcagagagaggacggtgcctccaatgcttggactttcctctgatgccagcctcagcccagcctctgccgccctgagagagactctgccccacctccccacacccgcctccaccatcccctcctgccagggtcccacccctgagcaacacggccctgccttctctctgcaaatccttcccagactaagctgcaacactggcagagcctcccaaggaagggaggagggaggacagaggccaaggcggctcctggccaccctcgcagcttcctccctccctggccacaaggacccaaagctcagagggatggatgaacagacaggaaggctcaggctggacacgtattgtatgaggtgggcctcagggttgcttttcctcctagaatgccactcagagccgtccctcttgctcgtgaacctggagccccctatgtctcccccagtacccctgcattctacacctagatcctcaggcttctctttatctccagcctcacctccatgaatgccccacacacctgtgcctgaccacacaacctccacctccacctgctcccacacccctgcccaacttccacctccacctgcttcacacacccctgcctgactgcacaacctccacctccacctgcccaagccttcaagccccagggcaaatgtcaccatcttttcctggaagactttccagaagtcccctgcctcccagccccagcccacagtgggttctccctcgtctgggccctgggcacctttgggctggacccatttttctaacccctgttgaatcctcacctactaccttcccccagtgccaagcagatctgggcatggagcaaatgctcaggaaggctgtgggatgagcacatgaaatggatggaaggatggacggacagatggacagatggatggatggatggatggatggatgagtggagcccaacaccagctctcaggtcctacggaggtggcctctctcagcaggtgtgatcgccattcctggggacctaacctccccttcttctgcttccagagcagcctggaatatcctttgatgctgtatcgtcttccctgatcctttcaagggggaaagatggcccatggtagcgatggggagcctgggatcagggaggtacacaagcccaggatcacatagcaagcagggctcccctggggccaagactgacccctgctccctccacccggcctggagcccctcctcccactgctctgtatcccatcccactgacatgggcacggggtcatgactagggtggggggtcatgcctggggcctgacaggcaacaccgtggccacagcccaccccctgcctgctgtggctgccacacaagccagccattcttggcaagacaaaggccggctggggcagggtggctctggtgcctccctggtgggtgtctggactctgcaggacgtcagtaagtggatcctggtggctgcgctctgatgctgggggctgcaaatcagattagccccatccagccccatggcccagctggcctcagacagaagcgccagaaagaggcgcagctgccagcccaggcctgccgtcctcctggtgtggacaagccctggcctccaggctgaggccccttgctgttcctgctgtgggcttaagggtgtgccacctcttctttctggccccctggacccgtctgtaagaccaacagttagagtgagaccccctgaggccttctggaggtggtgtttggaaatgcccccagggcagggcaggcacatagtgcctaggcactgggaattcaccttcagcacagccctcccccaggccccaggccctgtgcgggctcagaggccagcggcagccctgccaggtcttctcaccctgagacctatgctccccagggctgggcatttgggagacagagtcagagaggcgcctttgagccctctgtgtatctgcacatccacccatccatccttccatccaacctctaccaaccaatgttcatcaagcacctgatacacacaggcactgctctaggccctggggcacagccaagaatcacatcacggtcctgctgtcaagcagctgacatccagcaccctcccagccacccgcatgcctctgtgtgtatgtgtctgtccatctatccattagaccatctgttggtccatctgtccattcacctgtccatccatccatccatccatccacccatccatctgtccatccatccatccatctatccatccatccattcatccatccatctgtccatccattcatctgtctatccatccatccattcatccatgcatccatccatccgttagtctgtctgtcctttcacctatccttccagccatccatacatccatctatccatctgtccattcacctgtccatccatccatccattcatccatccatgcatccatctgtccattcatccatgcatccatccatccattcatctgtcggtctgtctgtccatccatccatccatccatccatccatccattcatctgtctatccatccatccattcatccatgcatccatccatccattcgtctgtctgtccattcacctatccttccatccatccatgtatctatccattcatccatctatccatctgtccatccatccatccgtccgtccatccatctgtccattcatctgtctatccatccatccatccatctgtccatccgtccatccatccatccatctgtctgtctgtctgcccatccatctgcccctccatctaactgttcatccatccacctttccatccatccatctattcatccatccatccatccgtccctccatctgtccatctgtctatccattcattcatccatccaaccatccatccatctgccaatctatctgtccatctgtccatccatctgtatgtccattccccccaccatcagttcaaccagtgtttactgagcacctactttgtgccaggccctgacaagcagcaagaggcagcctcttcccccagggacacagacgtaaaggagcagctacaacctcatgtgatcagcaccaggatgggggtagcagagggggatggggaggacgttctaggaggggtagcccttggtgggccctgcagggtgcctcaggccaggatgccccccgaagccttgctcagccactgaggccaagtcggctgaactctaatgggcctggcctctctgtccatgcctgaccccagagtgcaggcaaaagggccaggccactgttggaaaggccgtggcttcacggctgcagagcaccaaccccaaggcagcctggtgggcagggcgggtgaggcaccagccatatccctattacagagtcaagtaacgtcccaagacccacagaagggcactggcccaagaccacacagtgggcgaggggtctgggcatagcaggcaggcagggttgggaatggtgggggtgctactcacagctggagtctgctagtctcagggcagtgcccactccagctgcagtaatgggaatcagctgtgccaccctgcggtatccctcccccggccttgggagccggctgtgctgagcccagccaaccttcccatcaccctccttcctgccaccaagggctgctcacagaagctcctgggtcgggacactcactaggccacgcctgccttttggaaatccatgggccccctggcatctgggggcttcaaacactgccagttctgatgcctggccccagcctgggggttggcattcctgcgtctgtgtcaggagaggacagggaggtgcaggcttgcccgagccacagccaccaccatgctgagtcctgtccaggagtttccatctctgggcactgctactggcccagaggaagctggttcccaagacactgagtggggccgctctccatcagccgatgagtggacaggcgcctcggatggcttcctgccgagttaatgggtcacccattatgtctccacagatcttcccaggaccctgcaggaaggcaggccagagcagccccaaggaacagcccgggggagggaaggcagatggccacctcaaagccagccccgagcccttcccctctaggcctgagtgtcaagggcagacccagcccatggctttggggacctggtggcactgactccagcaggagaccccccgggctgagccctggcagttagaggaggcctggactcagatggggacagaacactgtctcagcctgatggcggctagaggaggagggtagggcccctggtcatgtgggtcctggctccgtgggcctgctttccacctgacctcagcaggcaggtctctcgggccattcgcacacccagctgcctgggagccccaaactgggactggtggaggggccctgcagaggggaagactaggatccaagaagcccatgaagccatgcgccagggccagagctggcctgcctggtctggatggtatgtcatccttgtgttacaagtgaggaaactgaggctcagggagtaacaccaccggttcaaggtcttaaagccgagaagtggcccctctgggttcggaaggcaggctgggccctggggcagcctctatccccagcccctcttccccaggaccctacggccccaagaggcttcactggcaactcggtcagccctctctagccccctccccagctcccctttgtcctgtccagggctgagcaccatcccacagcccacttccctaccagggctgtgtggcccagtgggcccctagagggagacctggggtctggatggggagggaagtgtttcaggctgaagctgagcctggggaagcgggcgggggtggctaggcgggccaccccctcaacagttttcagacctcaagaagtcaccacgaaattccattctcctgacagcaaagaaattgattcactcttgccaaagcctgcggcccccacaagaatgctgtaaagcttcctcccgctgcttccagacaggcagcagcatcaggtcccccactcctcccattcctggctacagagagacgcgggaaccccccctacccagttctatgcatgtgcccctgccaggctgggccatccacctctgtatggtcactcccttggtacaatatcccccttgctttctctacaatgggcacattgctcccacgacctgctgggtcaaaggcaccgcagtcaggggtagctggggagcaggagttgcgggggtggggcggctcagggcaggaagccccatcccctggcctgggaactgtggggagacggactcacagcatcttgtcaggtggggtgcagggtggcatggcacccaccatcggtgccactgatgtaaagtccaggtacagagcacaacccgtgcacatatttgggggcttggccatgcttggctgcaggggattgaggagggattgggcctcaagaaacggggctgggactaagtcacgaggtgcgtgaatatcaggcgggactttaactcagccagtggagagctatggagggttttgctctttgtgtgggtgtgtgagtggctatgatcctagttgtccagctgctgcgtggagaataagtaaagcaggtaggataggagtgggtgggatgggggtggaggctgcccaagtgattcagggaagagatgatggggatggatgaggctccgtctctgaaacaattcagatatgggagagcctgaagtcagcggtgtgactgaagcacgtggggtcatggacacccctcagtccggaggctggggctgggctgggactcagctgactttgtgggggcagccaacccagtcactgggtccttttctccccggctcaccctcaagcctctccagctgcatggaggctccagggctaggctctggctgatcggaaggggtttatggcaggaggtgacgccatgggagacttgtcacttgggcacagccagcaccatctgctggggcatctgctttcggaggtggtgactgctaattacctggggccaggaagaggcctgggaacccccatcccccacaccacccagcgggtacaggggctaggggtggggcccctggggccctaagagcaaatgggctacagcgtccttagcggggggagagggtctgacagtggggccagacatttatccagtgaattttttcagagcacctactatgtcccaaaacctgttccaggtctgaatgacaccaggtcgctgctgtcttgcggctgacattcaggtagaggtaaggagaggggctccaagggcacttaaagaatttaaaatgccatctcaggcgtgaacataactccgaggggggcagtttagccacggtggtggcggtggtggtcgtggtggtcgcagagaccctgcttaggagggcacgggaagacagcgcagccacgggcagagccgcctccgtccacgcttccggaggacgtggcgggcagggggctcacaccctgctcaggcgacccttggccacttccgggcccctcgcccctcaccctcggctgccggcgcgcattcctgccgcccccgctcgtgcgaggggcgggcccgggcccgtgggaagggccggggatgggggccgtgtgccggggaggcggggtggggagggcgcacagctgggccgcatctggcccgagcgcaaggagaccaaatgggacagaaggcggcctttcatccggcgagggaagtggcggccttcgtttctcctcgccatggggcgcctgaggatttcggggagccaaccctcccgacggagggccaggatcgaggaaatcagccagggaggaaggagtggaatttggttctggtgctttctcgttagaacctcgtgtccccacctgcggcacaggtggccaagctcttgctctgtacaaataacggctcccctgaaccgagcgctcgggaagacccaggcgccaccccagtttgcaaggcctgccgcgtcccaaggggaggaagccgtgctcaggaggggaagcgcacagcgaggaagtaggatgtcccccgcggtgcgtcggagcccagagcccgggtctcagcaccctgcccgctgcgccgagggcgcgcccctcccgtgccgggacgcccggtgcatccccggacggcgctggccaggctgggtttcctcttcagggacaccggcgcgggccgggcccgtccccaagcccctcggcggcccgcaggggctacccggggcggggggggtgcggggcgtgcacgtgcgcgccgggggcggggccgctgcgccctctgggcagttcccagcccccagccgcggccccacgtgggtctgcgggcgtggagcggcgaccggcgcgaggccccgcccccgagcccgggagccaatgagcgcacgggggcgggaccggggcggggaggtttaagagcgcgggacactggtgctgcgctgctggactgcgccgccggagcgacgggcttcgggtcggtgcaaggcaggcgcacggggaagggcgcgccgcgcggccgccaccccaccatgctcaagcgctgcggccggcgcctgctgctggcgctggcgggcgcgctgctcgcctgcctgctggtgctcaccgccgacccgccgccgcctccactgcccgccgagcgcggccggcgcgcgctgcgcagcctggcgggccccgcgggggctgccccggcgcccgggctgggggcggcggcggcggcgcccggggcgctggtccgcgacgtgcacagtctgtccgagtacttcagcctgctcacccgcgcgcgcagagatgcgggcccgccgcccggggctgccccccgccccgccgacggccacccgcgccccctggccgagccgctcgcgccccgagacgtcttcatcgctgtcaagaccaccaaaaagttccaccgcgcgcgcctcgacctgctgctggagacctggatctcgcgccacaaggagatggtgagccccccgcggcctggactggcgggcgagcggggcggggacccaccatctggtccagctggtggcagtgtcccatgggagtcaggctgcatccccatccagccactagggccatctgtgggcgacgccagtgcaccccggtgcacccagtttgcctgctggggccactctcccgttacagttgtgttactgtccccggggccccgcctcctgtccagctccagagtcctggatggctgcaggaccctacaccagtctccagtgcttggggttggtgccctgtgatacttctcaccccgtaaacattggagcgcattcatagggcattatgtcctcaaacttccacaagcaaattctgttcggacccaccctcagctcagaccccttcctggggagaaaggctcttcctttagagaagtgaggggttctgacctctgggccctttcctcatcacagtgttaaggtacggggagggagggaagtcattgctggttggtgggtcctggggagtacatctcaaagaactccaggttttggggtctgtgtggggaccctccccgcacagtgcagtagtctctgaggcctgcaaccttgggcacagcccacttcagttgggcatcagcttcttacacacacataattaagacacaccccactttgaacatttccctcgaggccacagcaggacggttgggctggggcgggatggggacagtgtgtggggcttgcagtcggggactgggggggtgtctctgggctgggagatgcagaggcatttgctgtgagggtgggggctcagggaagaccctgcacgccttcctccctgctcaaaccccggagacccagggccttctgacctggcgctgtcctgttttggggcactgtgggtgggtgggagcagggcttggtgaggtcatgagggcgacggggaggggcagggtcctccctggtcctggcgtggggaaggggccctgggaaccccatggcagcctcctgggaacacagcgtcccattcccaggggctcagcgggctggcgggagggggcggcgggggccgtgggttttgtttggcggccgggccgttaggattcccagcgccgggcggctctcacgccggccccttgggcaaggtaacaaagcccctttctccagcgagaaaggcgtcgggccccttgtgtgcagctacgcgctccgtgggaaccgctgctggcgtgctggccactcaggttgcctggcgatgaggggaccagcgggcccccccagcatctcttactgacagtccttttggggcaccatccctgagcctggcccccccacccccagcactcaagccttactgctatgtgatcttgggcatccttcagccccactctgggctaccaccagctctgagcacctctcatcttggaatttggggcctttctccaacagaggggatgtggtcagagggctgggctgtgtgatcctgagcaagacctggggcctctcagaccctcactctgatctctgaaatgggggaacatggtccttccaggagcacgttgtaagagactggcaaagcctgcaggcatggggtgaacccggcgggcactcagggtcgaggtgggggccatcactcccttgagccctgaggtccctactggagggtcaccccaccaggggacaggttgaatctgccctcagcatcagttcaccagcacacagcaagcaaagacccccttgtggtgggtgatgggcaggggtcctggaaacccacagaagagggcccccctctcccagccctgcacggaatgactcagacatggtctgatgggggagatagaaagatgtcagggctgtgcggggggaaaaccccgagaggctgtgtgaggcaacagtgggcatctgacccacatgctgggggaagggagggaggagggaagacttcctggaggaggcgccatttgagctagactaagagtaaaaaagtgcccagaaagggcactccatccgggcatggtgatgaccacagcatgggggttgtgcaggaaacttctagcaactggagtggtggctggggggagggtcggttggtcagcaggggccgcgctgagatgggcctggagtccaggatgaagagcctggcctttggcccagaggttccccgcccctcccaggagcagccaggctgccgcgctgccaccacagcggccacaattgctggggagaacttggcatcctgtgtttctttgaatcgcggctccaggaacaatgctgcttcctgtgggtgtcccccggcccccgcccccgtccaccctcatccacccggctcttcctcctgcagccccgtcttcgtctggaaagttaggtggcactggggggtctgggtccctagaaggcagggactgggctggtctagcaccgcctcggccccagggtatgacctcaggctggtgcctgcacctctctgggcctcagtttccccacttgggcctcagctggtaatggcacccacctccgagggctgtcagggagaggaagggagagaatctgtctttgcactttgttctctgcccaggggagctctgttatgcccattttactgaagacgagactgaggctctgagcggcaggtgagggctatagcccagcagcgcctttttcctcccctcctggtggctcaggtgtcgggagacagttcgcccggcacccccgcaccccatagccccgccttctcagatgctgttctagaggcctccctgctccctgagctgaacaaaggtgactttaatctccgtagccttgggctgggtttttagggcaccaccaaatctcgggagaacaggcctcccttgatctcattaagaaagcattttccttttaacccagcggcgcagtggagcgtctgcaggggctggccctccgcctcccacggcattcctgggctgagattctggggaggccaaggggctgggtgcgagtctgtgcgtgtggctgccctggggtgtctatgggtgctgcaggaggggtgcatgcatggagaggcggagacccagcctgccacccccttagctctgggcctcaccctagtgagcatgtgcccagggctgggtcaggctggataaggatctgagactaccaaggtgttccagggcctctgcgggacctgtgtgtacagggaaggaaactgaggctgggtgggcatcagggggttgtcccttggtcagagcattgcccgtacaccctgggttttgcactcagccatgccagggtgcgccgggcggcacgcgctgggcgggccgggcagaggaaggaacattcctccccgtgtgccggcaggcccaggcgggcgccggcgactcctggccccgccctggcggccccctcctcttccgcagagcgctcctggcagggggcggccgcgtgctggcacaggtgggctgtggccttgggcaagcctgggtttccttgcctgagcagtgggaggggtgctgggctgcatgggtactgggggcccctgacctgggggctggggacacctgaggtttcctgccacaaccctgctgaccgttggcaactttgcagaacttcagggctgctttggctcagagtgggtagcttgtcctgcaggtcacccaggacaggggtgctggcccaaagggcagctgtggggtggctgcagtgctggtggctgcaccctacgcgcgggacctcatgcccagcctggcccggttaaccaggccagctgtatggtaatgggcggcgcggccactctgcttaactcggccgagttaaggccggcccggcgcccctctcccgccagcccaggacaaagctggcggacaatgcctggtgattcatcctccctccaggccctttgtccgccagggcttggcagccgcccagcgaaggcctttgtccccaaccccgagtgattgagacttggcttcccacagccgacctcctccgcctgtccctcccgccaccccgcctgtcccccgcctttccagcagcctccaagtggcaggctgggtgctgtgtcaataagggtgtgtgccctgccaggtgcacggggcgggtcgggaaccggttacctggcgggcgggcgaggcgcaccacctggctcgtacctcaccgcgcctggacgaccttgggtgcagctgtcgaggttggggagtgaggcccccatcccccacccccagggcgagtgaatgcgtgagctctggcccagatggcactgagatggggcacttgagcccttctcagcacgagtggggaaaccaaggcccggagaagggtgggtgtcagtgtgacgcagctgcagctgcagcaactccagggcgccccgtccggcccccacagatggccctggggtggggatgaagggctgcctgctgaaggccgattttctccttccagacgttcatcttcactgacggggaagatgaggccctggccaggcacacgggtgagccctggacttggggcgggagggggcccaggcctccatccagagccgaacgctccccctccagtctccctgcccctctgggccgagaggtcaccaagggcaggacagggagggcagtttactcatggggtttgctccatgccccgccccaccactcgggccccccaattctcatgcaaatgaagcccattcagccccccgggtccctttgagcccaggcagcggcaacaggtggcgggtgctgggaaaaagctgcctgaatgggcgggggcggggccgccctggaaggggctgggctgcgggagggtccacaggcccaagccccgagctagggtgggggaggctacggccgccgggcccagcttgaactagggggcttttctcgagcccctgggccctgtggcgtcccccaggccaggcccctctctgggagccggctcagacctactcacagccgctcccctgtccacaggcaacgtggtcatcacaaactgctcggccgcccacagccgccaggcgctgtcctgcaagatggccgtggagtatgaccgcttcatcgagtccggcaggaagtgagtgtggccccgggggacccccatctccctgcccgagcctggcagcgcccgccccggcatgccctcccccgatggccctgccttgtcctcaggtggttctgccacgtggacgatgacaactacgtcaacctgcgggccctgctgcggctgctggccagctacccgcacacgcgggacgtctacgtcggcaagcccagcctggacaggcccatccaggccatggagcgggtcagcgagaacaaggtggtgagtgcctgcccctcccagtcccccacgcccacgcggagcgcacacccggagtgggggtgggacagtgaggggcagcagcgcctgggtctcaggacaccttctcccttctcccagcgtcctgtccacttctggtttgccacgggcggcgctggcttctgcatcagccgtgggctggctctgaagatgagcccgtgggccaggtgagtgccctgcacaggttaggccagcccggtcccaggctcctcgccactgtggggcctggcttagttcatcttcccagccatggggtgtccccagcctcctgtgtggcactgcccacttacttcctatattccacttccctctgggtttcagagggcagctgtgtttacggcggctgcccccaagcctgacctgctcagagcagccaggggggcgatgagcaccccaggcaccatccggcaggactcttccctgcacccagattccctccacagagagccacggagcacaggagctgtgcagggagtgtgccctggctgtggccaggggaggcagagggagctgcagcccagagctctcctcagggctcctctccctgaggagtgcagcgcctttgcctggtggggcctccccagctcccagcagatggctcccgcctctgctcactggtctgggcccttccctcccgcagcgggggtcacttcatgaatacggctgagcggatccggctgcctgatgactgcaccatcggctacatcgtggaggccctgctgggtgtgcccctcatccgcagcggcctcttccactcccacctggagaacctgcagcaggtgcccacctcagagctccacgagcaggtgcaccatcctccgggccccgccaggactccgagagcacaggaagggacgtgtggctgccgagaggggcgcagtggggtggggcactgttctaaacagggaggccaggcagcactccactgtcagccagggggggtcactcctgccatgagctcaaagctgtttatggcgggttgttttcctgccgtctcttctcttcactgtgatgcgcctactgtgcgtattttgtccacgctggcaatgcagccagccccagctggtccccagtttgggaccttattcctggggtgtgcagggcaggtgtccttccaggtccaagggaggccagggcagggccgttgcctcactcagggctgtgtggccagcctggggcggggcccagggatgtcgggcccctcccggcatcactccgcccgctccccacaggtgacgctgagctacggtatgtttgaaaacaagcggaacgccgtccacgtgaaggggcccttctcggtggaggccgacccatccaggtaaggaaaccccggcccagatgggcttgcgtagggtggcctaggggcgtcagggggcctcgtggagctgcagcagggtctctctaagcggcatgactctacatagaggtgtcccccggagtcctgcttgctcggggtggggccgccagtgttgtgggactgcaaatgggagctcagcacctgcctgccacccacgcagaccagcccctgctctgttcccacaggttccgctccatccactgccacctgtacccggacacaccctggtgtccccgcactgccatcttctagtggccatggctgagacccaatccctgggcgcccctggtatccaaagggcccagggaccctgttgcgctgccctggcctcggcattcgaggctcccctagggccgtgcctgtgcgtgtgcgtgtgcgtgtgcgtgtgtgtgtgtgtgtactgcatgcccacccgggtagcaggctgctgggcagttctgctctgtggaggggcgggcaccagcgccacttatgtgcctctgctccgagggccagtgggctgcagggcctgcttggaggaaggatttgtgtgtcggaggccactccgagggcaattctgttaggatttttggatctttctacagctacggggctccgggctactttgcagggatgcgatgcgtaggtgcctttctcttcctgctgaccacaagctctgtgctgggggtacctgtgccctgaagtcctggcccctgtgtcatagccccaagtacgactcactgagccatgctcattgcaggggaggctgggtctgggggtgcgtgacccaatccccttcctcctggcctggacgctgtggcttaagagtaacagcagccaccgcccagttccagtggccccacgaagcccccagtggctggctgtccagctgggcaaacagtggcacccctcccagctcttctgagtggggagtcttccaggcctcctcagaggtcttccctttgcctccccaggacagggtgagtcagagctcagcatttaatctcctctccaaagtagagagcaagtcgcccacagtgggcgtgtctgtaaatattgtgacagtatttttttactgtgctgttttttttgaaaggggatgggtaaaaagtagggtgttcttgttttttgcttgggagggtgggggtgggggagggtcttattttatcttatcttttctgtggatcagaaaaaacagaagccaaactcggggtcatctttgtttttaaagctgaagtgggactgtctggcactctgtgtatttatgcgttccagcatctggaacctcccatccctgccctcctcctgtgtagctgccacctccccgctgggcccagcatggctcacctgtcccgtgggctgtgtttcttgttgtttttctctttgcaaagacatagctaggaaagcgaatgataagggaaaagttctcagggaattgaagtgttgttgctatggtgacgtccttttgctgtgaataaaggtgctctttgcagcaatcctgggggtcctggtcttggctggaggtggggcctaagccccagggcagccagggtcaggagaggcacacaggtgaaggggaggcttggccttgggtgcaccgcatggagcaggtagataggaaacgcttagagacaactattttggaacgaaacctggcgtcactatagctgcctgctggtgactacaggtgcggcccacccagggtcagggtggtcgctggagcgtgagccctgtgcttccaggaggaacaggtctaggatgctgggggctctaggtcccagccaaaagcacaaccccaaggctctggcctggtctggccactggggagcccagcccctgcaggagggacagtgactcctgtgaccgggcctggggcctccttatccaacttcactcctgccacgagctcacagagtccacatcatcgcctcactttgcaggtggggaaactgaggcacggagcagctgatgcccaaggtccagcagccatgctggtgggctggggaggcgctcagactccaagccaggcaggccgtgggtccggccgccccacagctggtaatgctgcacctccctctcctgtgatgtggccccaggccccgaccccgctcaggggtggtgggaagagtcctggagagcaggagcagtgccggagcccccactgcagctggtcccagcccctgcagagatccagacgcttgttttttaaatacagcagctctgcggtgcttttccttcctcaaatccagcctttgagggtgactgagtaggggacgggtgctgcagcctctgcggggattccctcccctcaccctcctggcagccccggggcggctcacttcctcttcaccatgagcccccaccccttccctggggcttacacccttggcctggcactgccctggccgcgccccttgcaagttcctgctctggcctgaccctgcttcccccgaccccagggctccaggtccccctcctggtgcctctgcaccccccactctgctccaaggagacgacacactgtgaaaagtgcctctctatgggggggtgccttgccctcccccgtcgctgccccctccagaagagtgctgacgtgctgaatgggcctgcagagacccccttactctaagcctggctgggggctaccctggccttgggggcggctggcagggctgtgaccccaccttggccttggacggtcctgagtcagcagagcagctgcctggggggtgtggacagtgatggggatggcgggaggatggagggccctcaccgtcacgtggcctgacccccgtctgggtggctgtggtcctccctgagcacccaccatgtgcccacccacttctcataggacggcataggcccctcttctgaacgaggaagctgagactctggggtggggcggggggggtcgtgacggaacaggctgcgggcagaggctgctggcctccttcctgcccggctgactcagaggcttggggccttctgccctggccccgacgctgtccccgcctgcagctggcatcgcctccccacagagctggtggggccccgggggcagaggtgtggctggacccaggggtcggacagacccatggatacagctgtgggggccctgccagggcttggggagtccccattaatgttcatatgtccctgtgtgtggagcggggtgggagtgggggctaagtgggcatcggggagagcagaggagcaagaagtggggtggggaggaagcccggctcctcccgaggcctcgacctctccatctgacaaatgggaacaaaggtaaatgcagtccccgggtgctggaggtcagggggtgttttggaaggtgcacaggacagcgcatctggccccttcctcttccaagctgagggagggacgtttctctgccctcaaaaggggaagcaggcccagcagtgtcttaggggaatgaggcagcctgacctcttccatccaccgcccccccaccccccagaaggtgactcacccggcaggggaggtgaagtcattcctcccccaggtacattctggggacagctgtgtcccacccaccagtggtgccatcacatcagattagaggtctggtcagaaaggggcctggctggtccctggggctccatgtccccccagtctagcccagccaggccccctttcccaaacttctgatcattaatggggctttcaaaacaagtaaaactgcaaccacaggggctgcagggcgctcagcgagggtggcagacctcagccgccacccctgcttccgttctgccaggcgagtgcctggggagccccaaggctgcttggggtctgggaggggctgctagggtggggcgcctccccactcagttgaaaggaacttcccttccactggggccatcagggccaacttcctggaagaggtgcctctgagctgaagcaggaaggctttgtcaagatggagtagggagagaaggggccttccaggtctcagcacagcctgggcaaaggtgcagaggtgggatccactgggaggactggaagcctgggaaggagggcaggcaatgcagttgggtctcttgatcccccctccccaatcacagacaactagggctctccacaggctcagaggggccagggccaggctgctatgtgacttcagccattcttgccgggtgggcctggggtcagagggaaagcagggaccagggccagatccatcttcgagtctgtcagaacaatgggcaagtcttgttccctgctgggtccatgtgcccacacagcctcagccttcttagatattctgcagggtgaccccctgcttctgagcccagccccaccttctgagcccagaattggacacacaggaaggcccttggggccaggcgtggtggctcacagccgggctgtgccctctgcctggagccgcagcctggatgcctcccaccccacatttaggcttcaggccccacagctgcctcttcccagaaccctcccggcacgcacttcggcgactcttacaagtacctgttcagcgtcagccttcgcccaggagtgcaggctggggacgagggcagtggccacctctgccggtcctgtcagcacctagtgcaatgtccagcccaccgtgggcactcaacgcaggcggctgtgctgccgcaggtcacagcaccaatcagacacccccatccccacacacaccctgcaccggcccacgcggccatcacactcggagcacacgcgctccgatgtggctgcactgttggcacacgcacaggcgcgcacgtgggcgcatacacgccggggcgccctgacctccccgcacgccctcccgcagccgccccggcctctgtccccacgcgtgtcacacacggctgggtgtgctcgctcacgccgtcccgcgacgttgctccagccggcgcccggagctcgatcgggagagctgctgttggccgcctctgcctgccagcgtttgccaagcggtttccatggtgacacatcttggctccgacaggaaccaaggagtgtggggaagagggtccccacggagggggcgaggcgaggcaggaggtctctgcgtcttcaggctcccggcaggcatggggggctccacgagtgcagacaccccccaatcccaagccaggcttgcaccccgagaaggaggctctgggctggtccctctgggctgcctggcacaggggctgacttaggtcagtcagtcattcaacaaactttctggaagagccactctgtgctcacagccgggtctacgatgctgcccaagacgtggtctcgcaagaggctcggagtcgaatcctgaggctaaactgacgtcccgccaccctactgaaggccccatctagcaggttggtccgtggctgcgtaagcaccaaggcccaccgagcactttctcaaaggggggctcccctctgtggtagatcagttacaaacgtgtccccgatgccccactcctcccctgaatcaccacgccctttgctgtgtgactttgccccaactcctgtctagaggtggcgtctacttccccatccttcaatctgagcctgtcttatgacttgctgtggccaataaaaggtgacagcaatgacattcccagttctgagcttaagcctccagggacatgcgtgcctctgcctgctctccccgactcctgctatagcacgagaacgggctgggctgctttgctggaaggcaagagggccatggagcctgggtcaccctagctgaggccatcctggactagctagctcccagctgcccacagatgtgtgagtgagcccagctaggacttgccaggcctagcaatgagcagcagtaccaccaggccctttaatactaaggacatgtgaagtcatgtgtttggagctatttgttactcagcactagctacctgatacccctctctctagggccctggccagcagctgcccaacctcagttagcacaggccagaggctctaaaagttcccaggggtgctaagaaccaggccatggtgacagctggattccgctggctaacagtgccagagggtgccggggacagagcttgtgggagggggttcccatgtcaagtccatggcaggagctactgaagcagaagcacgagtctccactgcctttctttgcctcggtttttccccctgtgaaatgggcccatcaccctgtcctgtctcctggggacccctggtaaggtagcgtgtgtggcagctggaaacagacctactacgtgccagccccgggttgcaacctagggagagaggcccattgctgccttctaggttcccacaactgagaaggcagcgtcactaatcccagcttacagactggaaacagtggggagaggatgagtggcttgcccgaggcccaggacacacaggagcaggtgggcatggccacaagccccggctgggtctgagctggtggttatcttcatgtttttctccctgtggtcacctttttggaaattttttttttttttttttttttttttttacatttgactattttcttgtttattggtatttctttgggagattttttttttttttttttttttgagatggagtttcgttctttttttttttattttttttttttttattgatcattcttgggtgtttctcgcagagggggatttggcagggtcacaggacaatagtggagggaaggtcagcagataaacaagtgaacaaaggtctctggttttcctaggcagaggtccctgcggccttccgcagtgtttgtgtccctgggtacttgagattagggagtggtgatgactcttaacgagcatgctgccttcaagcatctgtttaacaaagcacatcttgcaccgcccttaatccatttaaccctgagtggacacagcacatgtttcagagagcacggggttggggataaggtgacagatcaacaggatcccaaggcagaagaatttttcttagtacagaacaaaatgaaaagtctcccatgtctacttctatccacacagacccggcaaccatccgatttctcaattttttccccacccttcccgcctttctattccacaaaaccgccattgtcatcatggcccatccccaatgagccgctgggcacacctcccagacggggtcgtggccgggcagaggggctcctcacttcccagtaggggcggccgggcagaagcacccctcacctcccggacggggcggctggccgggcagaggggctcctcacttcccagtaggggcggccgggcagaggcgcccctcacctcccggatggggcggctggccaggcggggggctgatccccccacctccctcccggacggggcggctggctgggcggggggctgacccccccacctccctcccggactgggcggctggccgggcggggggctgacccccccacctccctcccggacggggcggctggccgggcagaggggctcctcacttcccagtaggggcggccgggcagaggagcccctcacctcccggacggggcggctggcccggcggggggctgaccccccccacctccctcccggacggggcggctgccgggcggagacgctcctcacttcccagacggggcagctgccgggcggaggggctcctcacttctcagacggggcggttgccaggcagagggtttcctcacttctcagacggggcggccgggcagagacgctcctcacctcccagacagggttgcggcccagcagaggcgctcctcacatcccagacagggcggcggggcagaggcgctccccacatctcagacgatgggcggcggggaagaggcgctcctcgcttcctagatgggatggcggccgggaagaggcgctcctcacttcctagatgggatggcggccgggcagagacgctcctcactttccagactgggcagccaggcagagaggctcctcatatcccagacgatggggggccaggcagagacgctcctcacttcccacacggggtggcggctgggcagaggctgcaatcttggcactttggggggccaaggcgggcagctgggaggtggaggttgtagcgagccgagatcacgccgctgcactccagcctgggcaccattgagcactgagtgaacgagactccgtctgcaatcccagcacctcgggaggccgaggctggcggatcactcgcggttaggagctggagaccagcccggccaacacagcaaaaccccgtctccaccaaaaaaaaaaacgaaaaccagtcaggcgtggcggcgcgcgcctgcaatcacaggcactcggcaggctgaggcaggagaatcaggcagggaggttgcagtgagccgagatggcagcagtaccgtccagctttggcttggcatcagagggagaccgtggaaggagaccgtggagagagagggagacggagagggagagggagagggggagggggagggggagggggagggagagggagagggagagggagagggagaggctgtgtgtcagaggttttcctcggagtttcgttcttgttgcccaggctggagtgcaatggcacagtcttggctaattgcaacctctcccctttttggaaatattgtacttcctgagctaactgcacttacgaggtaatgattggtgtgagtttctagtctctgtttgtttgttttttgagacagagtctcattctgtcacccaggctggagtgcagtggcacaatcttggctcactgcaacctctgcctcccgggttcaagcgattctcctacctcagcctcctgagtagctgggatgacaggcacctgccaccatgcccagctaatttttgtatttttagtagacaaggtctcaccatgttggccaggctggtcctgaactcctgacctcaagtgatccacccgcctcggcctctcaaaatgctgggattacaggcgtgagccactgcgccccggctcgctcctttttttttttttttgagacagagtctcactctgttgcccaggatagagtgcagtggtgtgattttggctcactgcaacctttgcctcccggattcaagtgattctcctgcctcagcctcctgagtagctgtgattacaggtgcccaccaccatgcctagctaatttttgtatttttagtggacggggtctcaccgtgttagccaggctggtcttgaactcctgagctcgagagatccgcccacctcggcctcccaaagtgctgagattacaggcgtgagccaccacgctgggccctgcagtctcttttcactgggtactgcggttcagtgttactgcctaggggcagctgatccgcagagcccctccctctctgagttcccccaggccagagctgagagccaggctctccagatccctgtgggagggccttgtatctgagtccagttttcctccagcacgaggcctggcatttaattacctgctatcttgtcagctgttcagtgttcctggcctttggatatttcacccagcgtgtttcattgtcttcagggaaacggctggtccaggcacctagcctgctgtcaccgggaagggacatgtgccccgaggcggggctgatgtcactgctgcaccctggtggggcgcaccagcccacggctgtgccacccgggaggtgcccttttgttggagggcatttgccaaaaccagcaaacttgggttctcattctgtggccttgaggggtcagggggacagaagtcagggccagtcctgcccaaaatggggagcattatagaaaacccttcccaccttaagctgaaaacctaaaggtctacactcttagggtaagaatgaaacggaattagccctgctccctccacacgaaagacacttggtgctaagagaagcaaaaagaaaaagttcttcagaagttagggctacaggtcttctctagcacagatttgaggtgctagcacagatttgaggtgctgccaagaatgcagagaactccaagcactcaatgcgttgtttgttttgacatagggtctctctctgtcacccaggctggagtgcggtggtgtgatcacggctcactgcagcctcgaactcctgggctcaagcaatcctcccacctcagcctcccaagtagctgggacttcaggtgcataccaccatgcccagctaattaaaaacaaaagagatacggcaggtggatcacctgaggttaggagtttgagaccagcctggccaaactggtgagattctgtctctactaaaaatacaaaaattagccaggcatgatggtgggcgcctgtaatcccagctactggggaggctgaggcagaattgcttgaacccaggaggcggaggttgcagtgagccgagatcacaccactgcactccagcctgggcaacaagactgagactccatctctgaacaaaaaaaaatgtgtagagatggggtcttgctatgttgtccaggctattctcaaactcctggccttaaacaatcctcctacctcggcctcccgaagtgttggaattacaggcgtgagccactgcgcccagcccccaggaataattttaaccaaaataaattggccgggcggagtggctcacgcctgtaatcacagcactttgggaggctgaggtgggtcaatcacctgaggtcaggagttcgagaccagcctggctaacatggtgaaactccgtttctactaaaaatacaaaaaaattagccaggcatggtggcgtgcgcctgtaatcccagctactcgggaggctgaggcaggagaatcacttgaacccaggaggcagaggttgcagtgagccgagatcgtgccattgcactccagcttgggcaacaagagcgaaactccatcacaaaaaacagacagacagacagatagataaaaaataaacagtgctgggaaaactggatatccacatgcgaatgaatgacactggacccttgtctcagatcattattattaaattaactcaaaaagggttaaagaaagacttcaatgccatttattttgagtagaaataagtcatttctttaatacatcaaactgtgggatttcttgaccttgcttctctcctggtcctggcttccccagaggatccaccgggctgggctggagccctggggctggcagtgtcccacagaaggacatggtgctgcctcccttggtcctgagccccagtggcagactctggttctgctcagtagcagtcggcctcgtccccctgcaggaagcctcccgtggccagcatgtcctgcaggagggactggggactcttttccacgtggtcgctgctctcggccagcgtgctccgcaggccctccaggtctagggacctgagcatggccagcacagcctcaggctcctggtcccctgggggctgggcctgctcacccgcccgccacctcggcagggtggcctctgcggaggcagtgttggggctgcccctggcctcccgcaggctgctgtaggaagcaatcttgtccctcaggaagagaaggaggtcacaagacttctgcgccacagggcggtcgcagtcaaacaaggcacaaaaggcgaagtcaaagagccccacgtggcagagagccctcagtgcctcggtgagtggctgggctggggccacctcgggtagggccacggcataggggcagtgggtacgcggcggccccaaagtctggcccaggaacacgagggccagctccaggccctgggcgcggacctcccagtccaggtctcggctcgccgcctgcagcacagtggccacgaactgctccgtgtcctgggccgcgtcggcgtggccgtcccgcagccactcagtgaagacttgcatgaccgcccgccgtgggaagccctccgagtctacggagaggatgtgcaggagctccaggaacaggctctgggggacagggagcaagtgcggatggttggtggggtggcaggagcgaggctcccgcaacaggactccggtacatgatgggggctggccccggacatgcagtctagggccacagcccgctctgacaccttcccatgctgcgcagtgagcacacggccctccaatcctcagtttacccatctgtcaaatggaggtaaccatgtctaagtggaggggtgctggggagacagaaggcgaagcgcacaggtcccacacccagcacagccccagggcctcggcagtcactgctgcaggcgctgcccacagcagcagctgctcccacgctgcatgctggccgctcgaccacccgcaagcaaacgagcacacacgatggccaggcgggagttg

SEQ ID NO: 1641 - DNA, 1140 bp, Homo sapiens
atgctcaagcgctgcggccggcgcctgctgctggcgctggcgggcgcgctgctcgcctgcctgctggtgctcaccgccgacccgccgccgcctccactgcccgccgagcgcggccggcgcgcgctgcgcagcctggcgggccccgcgggggctgccccggcgcccgggctgggggcggcggcggcggcgcccggggcgctggtccgcgacgtgcacagtctgtccgagtacttcagcctgctcacccgcgcgcgcagagatgcgggcccgccgcccggggctgccccccgccccgccgacggccacccgcgccccctggccgagccgctcgcgccccgagacgtcttcatcgctgtcaagaccaccaaaaagttccaccgcgcgcgcctcgacctgctgctggagacctggatctcgcgccacaaggagatgacgttcatcttcactgacggggaagatgaggccctggccaggcacacgggcaacgtggtcatcacaaactgctcggccgcccacagccgccaggcgctgtcctgcaagatggccgtggagtatgaccgcttcatcgagtccggcaggaagtggttctgccacgtggacgatgacaactacgtcaacctgcgggccctgctgcggctgctggccagctacccgcacacgcgggacgtctacgtcggcaagcccagcctggacaggcccatccaggccatggagcgggtcagcgagaacaaggtgcgtcctgtccacttctggtttgccacgggcggcgctggcttctgcatcagccgtgggctggctctgaagatgagcccgtgggccagcgggggtcacttcatgaatacggctgagcggatccggctgcctgatgactgcaccatcggctacatcgtggaggccctgctgggtgtgcccctcatccgcagcggcctcttccactcccacctggagaacctgcagcaggtgcccacctcagagctccacgagcaggtgacgctgagctacggtatgtttgaaaacaagcggaacgccgtccacgtgaaggggcccttctcggtggaggccgacccatccaggttccgctccatccactgccacctgtacccggacacaccctggtgtccccgcactgccatcttctag

SEQ ID NO: 1642 - DNA, 1140 bp, Homo sapiens; identical to SEQ ID NO: 1641

SEQ ID NO: 1643 - protein, 5 aa, Unknown
  Cytokine receptor extracellular motif found in many species
  Misc_Feature 3: Xaa = any amino acid
WSXWS

SEQ ID NO: 1644 - DNA, 192673 bp, Mus musculus
  misc_feature (1)...(192673): n = a, g ,c or t
taatcctttaagggatttctgtgttacttatttaagtacttctaggtgtttacctgtgttctcctgtatttctttaagggagttatttatgtccatctgaaagtacactatcatcatcataagatgtgtttttttcccttgagatttctttttttttaaatatttttattaggtattttcctcatttacatttccaatgctatcccaaaagtcccccataccctccaccaccccccactcccctacccacccactctcactttttggccctggtgttcccctgtactggggcatataaagtttgcaagtgcaatgggcctctctttccagtgatggccgactaggccatcttttgatacatatgcagctagagtcaagagctccggggtactggttagttcataatgttgttccacctatagggttgcagatccctttagctccttgggtactttctctagctcctccatttggttttctcatggaatattttggattctccatttatggtaattgagaattttgatgggtatagtatactggcctggaatttctgttctcttagggtctgtatgacatctgcctagaatcttctagccttcataatctctggtgagaagtctagtgtaattctgagagggggccctgtgatccatccaatagctgactgtgagcatccatttctgtgtttgctaggccccggtatagtctcacaagagacagctatatctgggtcctttcagcaaaatcttgctagtgtatgcaatggtgtcagcgtttggaagctgattatgggatggatccccggatatggcagtttctagatggtccatgctttcgtcacagctccaaactttgtctctgtaactccttccatgggtgttttgttcccaattataagaaggggcaaaagtgtccacactttggtctttgttctttttgagaaacttaggaaacccaagatataagatacaatttgctaaacgaatgaaactcaagaagatgtgcttttaaatcagagtcttgcctttctggtatgttgacatttccagggctcactgtggtgggagaactgggttctgatgatcccaagtagccttgatttttgttgcttatgttcttgcccttgcctctcgccatctggtatctcaggtgtttgctgctcttgctgtctctgactgtggcttgtctttcctgcaagcctatgtgtcagtattcctgggagaccagtgctctctgtgaggaatttgtgtatggagagctgtggcacaaggtcagctccaggttgcagacagaaactggaaggatcctgttcctgctgttccttggttcctgtgtcctgatagctctgggaaggtccctcttgggccaggaatttgagtagaagtggtggtcttagctgtgctcacagatgtgtcagcactcttgagagaccagctttctctgggtggtatttgggtgtggagcactgtggtacagaatgagctccaggttcagaccatttctttaagtgcttcttgacttttagatatttctctgttaagaattcttgtttagctatgtaccccattttttaattgggaaattaatctgaaattctctttctttgttgagtctttgtgtggtttacatatcagggtgattgtggcatcatagaatgaggttgccaatgttctttctgtttctattttgtggaatagtttgaagagtattgctattcacttttctttgaaagtctggtagaactctgtgtggaacaatttggtcctgagctgcttcccaccgctcccacccccaccccacccccaggttgggagattttaatgactgcttctatttatagtactatttacattgttcacctgatcttgatttaactttggtaagtggtatctgtcaagaaaattatccattttgtttagattttccaattttgtggagtacaggcttttgaagtagggcctgatggttctttggttttcctcaggtctgtagttatgtctcccttttcatttctgattctgttgatttggatactgcctctctgcctctgagttagttttgataagcatttatctcttttttcaattttcccaaagaaccaggtcttggattcattgattctttgtgttctctttgtttctaatttatcgatttcagccctgaatttgattatttcctgcaatctacccctcatgggcatgtttgctcttttttgttctcgaattttcaggtgtgcttttaagttgctagtatgagaggtctccagtttccttatgaaggcagcaatgttgtgaaaagacagctaatgtaatactgagaagtggactcttctttttgtgatagaattttcttaagctctctggatctggagcatctctgtctctccagagtcactgtagagaggtccccatctaaacaggaagaacctaaggaggcaagctagagagatggctctgcaggtaattgcttgccgcctgcatctgaggccctaagatcagaactcacagctcccacataggaagattgtccagtaggatgcagctgtggtttcagaatgtggagaggataaggggaccagatggtcccaaagctttgctactcaacctgtcaggttataatagtgagatccagataataagagagagaagtgattaaggaagacatcctaatgtcaaccactggcttacacatgcattcactagagcgagtacacacacacagaactacacatgcactcacaagagcaagtaaacctgcacacacatgcacacacacacacacacacacacttacacatgcactcacaagaatgagtatacctgcatatacacactcttacacatgcactcacaagagcaaatatacctgcatgcacatacacacatatgcacatacacacatgtgtaaacttgagcaagataaagcaggctgaagaaagaggatgagaaagcttaagacccaagacccagaaagttcctgctggaccctcataggtcacagtgaaaagacttttaagagtcccctgcccagttggaattggagaggaaagagtgtttctctctcagagaacatgtgcaatgttgatttatcaagttggcctgaaatagttgtggggagacaatatctgaatagatttgtcttctctggaagtggaggtgtgcctcaggacagagctctgagggaaattctagttacatcccttcacttaatagttgagtccactgcacagttaacctttccaacctatgtttcctcatgtgtaaaacactgggtgctgattcgtggtattggaatgtctctgtgggaggaggttgagaagaggttagagcagctgtggtgctcgctaagcactctgcagatgtgttctatgacccaatactgagctaggttagggtgatgctggtgaagagaagggagcatgtgaaccacagctagaggtttccaaatcttaaaagccacaaaactcattaggagccaccagccacacaggttcacttgtagcagccattcataagacttttacattatgtttgatccctgagaagttaaatattcatggatagacagaaaaatgtaaaaataccatagaaccagtcagcaatctggaaaaaaatgttagtgaagggtccctgttggcctgtacaggtgagattgaaggaataatcagatgtttcagtatcctgaaatagaaattctgagaagtctcctctcttactgggacatgctactggaggtggagagggatggctggggaagctggtgttattcctagaactctgccagaatggcagctaactgggcttgtaggtggaatggggtgggtgacatggtcactgccagatttgctacacagagaaaggaggaagcaagccaaatctaccagtctatttccttagctttcaaggacgtagaaatgtattagtgtacaaaatgtggtgagcacagtaggtctctctctctcacacacacacagtaggtctggcccatctagctcgtactctccttccattttggagctgagccaacactgctgataataaattactgactctgaaacttaactacatattggaatcacctaggtagatttaggaacttctggtgactacatttttcccttagagaatcttaatttaattggtctggagacccccaagtagctttaagatatagcaaagcctgagaattagtgccctatattgaaatcagctgagaatcaccagcctcattaagtgagcacatgcatatcatacaggttttcataaagccaggaggagatagagctgagacaagctagaattgtgctatccatcattactatttaaatctaatgtaattacattcaggtaaaaattttaaattacttcttttgttccactggctgcgtttcaaattttaaaagatgcatatggctagtttctgccatttgaaccagacagaacatcatggaaagttctatgaatcaactctaagaaattggcaggaccttcaagctaagcaagcagatgcttaaggcaataaggcttgggatagaaatgaggaaggctgagcctcacacactggacattcagggggagagaagtgaactgtggagaacagaggctctgggcaccagaagacatatttgacagctcgtgcatgtgccagcccattggatgatttgctgctccaattgcgtagagcctgtagcctacaatgctggtagtgaagggagtggaaacccaaggcaactggcactaagccaggtggcactcatgtcattgacttcagaaccacacttcaaggcaaggtgctgcacttctactggctgctttgaacaacatcaaagccccagacggtgtccatcatgacagcagcatccatctctgtggtcaatgtcaggttgattccaggacctccaaccagaacatctctggcatcataggctcatatattgaaatgatcaagtgcacagcagaggactcgatgaactgctagttgggggagtggggaggggagtcccttgataccctgttcagtctgctccagagggctggaaggatttacatcatggtggctgaagaatgccagtctgggcaggaatctctctgcaaggcaccaggctgaatttttctagaaagaagggtgcattcattttccagggttgctttaagtaagtgacatgaggtgggtggcttaaaggacacatgaattcttgcaggtgctgggcaacagttgaggtcctgagacagagcactgttcattcagctagcccaaccatctgttttattatagaagctttatgtagcttaatatgccctcttggaagttaatatggtttgaaaaattgcctgcaataaaccctttctttcttgcacataagcttatcctttcttcattcagagaaaattagtttctctctatccaccctaaataaatgtggggagaaagtacttaaagaatatcagtctgagggagtatctagtttggagcctgccctgaggatatggtgaaatcctttggtcgatgatgtcattatttaccagggcctgttagaaacaagggtttctaaccccagtgcactctgactggcctcagtggttggttcctatggccaccaccttcacattctcaccaacagaaattttaaatttacacttacttattttttgttcatttatttaagagcacacttgtcacagtctgtgtgctgaggccaaaggataaccagcaagagtcggttctctccttttaccatgtcggatctagggttagaattcaagtcctgaggcttgagagcaggagcctttatgaagaaaaactttaagtttgtaagaccagaggttaacaaagaggttaaacacatgagctccagagctcaactgcctgggttcaaatccacccttgttacttgcaagctgtgtataaatgggaacgttatggatgacttctctcttcatgccaccgtagcctagctatgtttgcttttcaaaggatggacgtgaataaacatgaaataagggccaggtgatgcattccgtccacatgctgagttcaagagcctacgctgcatccgtcacctttcacatatgacgtgaaattgtctcagctggaaaagggtacaaagctttctggcgtgattgctgcaaaagccaaagttaacagatggctgcagatgtggctcaaggcaactgcagcctagcctagtgatcaaagttctagtccccagatccacgtaatgggaggcgaggactgactcctacaaggtgtcctctgacctctgcacatgtacacatacacacacacacacacacacacacaagcacacacacacacatatacgcgcacaccaccaccattacaacttatttaaacggataagaacatgtcctgaaatttctaaagcaatatgaatatgtcaatcatgatgaccagggaagataggggctgaattactattgttgtccttgcaaagtgggtgatagagagcaagcaagtttaaaccacactttaataagaagagcctcaacttacagagagcagtttatttcacaaggactggcgagcatgattgcctagggcacacagaagacgttggtgtgctcctgccatcccaacccttgggaagcacaggactgcctggattgctgggccctaccctctactcagaaaatcagtgtgagggattggattaaatggagtgggaacattcccctgctggagctggcatttgcagttagtaaggatctttatatttgcttaccttgaatgcaacaccccttattaagaatcatgagcaactcaaggctattgctctgggaaccctgtcttgagtctccagaagagatgatgcatctctcataatgactggggatgcataatgcttaaaaccaccttttcctactcatttaacattgtgagcactcacttgcctcaacaccttctctgtgtcgaaaacctgatgctcttgtggttccaagtggctgctgtttatccttggagatcaaatattttcataaagtaaatctgtactatttcatttcttcccatttctctcatttcctggggatggggtcacatgcttggatagcctatttgagatatgtagcttaatgccaacatgattcatagctctatgtgtgaattacacttgagaataaaagtgtgatccatttgtgtcaactgaagtgtctaatacaaaaacaaagaccaatttccattcactgtctcttttcacttgagcctgcccaagacactgaatgtattttctcttctctgaagatgtcaaatctacctataacccatttctctctcaaaagataccacagaagtatatgtaagcctctcatcttgtggttcattatttcacgcattcaaaccagatgttaaaatacaatgagtctctcagggacaaatggaaccattccatgagggagaagagcctggaaggacatgtcaggcctgtggtgtagatgccccatctcagtgtggaggtctctggccatcgaggaatgcaggaaagtcaccagctgttacagtatctttttccaaatgtaaaatagtagaaaccgccctttatacattggagatgaagcagaaagcacaccgacgaaaggcaaaggattgccttcatgtcaccttaactggtgatccacaaacttgtaaactctgatttccaccattacacaaaactagaaagactcaggaattatgccagtaaattctcgtactgccatagtcaatgaccaaagaatcagtcctgttcccaaaatggatgtgtgtgtgtgtgtgtgtgtgtgtatactgacatgtatgtatgtatatgtatatgtgtatgtgtatgtgtatgtgtatgtgtatgtgtatgtgtatgtgtatgtgtatgtgtatatgtatatgtatatgtattatgtgtatgagtgtaaaattctgctaaaataggaatggagtcttcataaggtgccagagtagtcaaagaatgaccaacttgtaaaatcctaagcatagtggactggagatggctttctgctgcgtatgatatgacaaaaacttatgttcctttctgctgcgtatgacatgacagaagcgatatgctccttttccttgaaacctggattgttcacccacttgtgcatgatgggtgatgcccctcacctataggttctctcacgcagtccagcatgggaaggcaagtggctaggaccagcatcaaggcaatgcagcttagtgttggagcgagcatgagactctctttgtggagcagtgtggtcatggatgacagcgtagaggacttcttccctctggaagattattatttcctcttacctatgtgagagtaaaggaagtggtattataatttgtgctaagacccaatacttttgagacagttggaaggccacatctctacttgaaagccaacatagtacaggaacaacaggctccagttgatttgtggagcgtgaaagaattggcttctcccatgggatggtgctacaggaactgggagagatttttttttcaggcttccaagaatataaatggctttgtgtggtttcacttgtgacaaacactaagggaaagaaccttacatggcccagatttagacaggaaacagacagcagaaccagagtgtccagtcatggagactgagcctttggagaactaaactctcccaggatgagggcacagagcaagcactggacagtagaacatcgggggagcttcagcagaatgcattacttcccttcatctgaagggacaagacatgggaccaaaagaccagatatgacagtgtgtgcctatgatcccagtgctcacggagaaactgaagcaggaagattgtgatagactctaggcctgcctggatacatagttaacttccagacagcctggactacatagaaagactttgtctggaaaaaaatgaaaaatgggacctgaagagatgattcagtggagggtctgagtttagttcccattgcctacatcagagaaatcataattactccagctccaggggacatcacactgccttctagactctgccagccgccactcccatgtaaacatacacatgtgcacaaagatatacttgtacacataattaaagtaataattttttaaaaaatctttaaaacaatccaaacagtaacaaagcatgcgatagggaggggacagagaaggatgagggttcatatcaccaaggcctagcacatgctctctgggtagaggggaagagtctttggcagcatctgtatgtgtagaggcagcttgactctgttctcagactccctcatctcatgtccagtccgccctctggtgctcccctcccagatgagagcccaggaaattcaatgtgtagattcagcctcctcgtggaacagcacagcatgtttcagccctggacctgggagaaggggacaaacagaggcagaaagaattacagctcatggcatgttggaacagtgtgtccattcttctaattgacattttgtagatgagaaaaccgagggccaccaattgtggtgaaccagtgaatgtctacctaatgaagaacatacttgagaacaaaggcagctgacctctgctctgatggccctcctctctgttgtcctgggaatcatgagttggaaacccccattagagtagacttggctaaaaggagacagctagcctaccatttcctatggctgtgcccagaagacatcactaattgatcacagatgtctttcctactgagcccagaaattccttcagactctcctgcactaaagatgatctcatcttgttctgttatctaattcatataacatgatttaataactccaaataaagaacctccgactgtttgtgatgtaaaattggtaaaattgtctgcaccaaagcttagctcattctctggagtggcctgtagagtttcagtttgctagccctagtgactattgggagggtatttatagattaatttgcttgaaggttagtactaaaagtcctaatccctgggggtttcctttttctcctttcaggtggacaggacggaggtgattcgtacctgcataaacccagtgtactcaaagctgtttacagtggacttttattttgaagaggtccaacgtctccggtttgaagttcatgacatcagcagcaaccacaatggactgaaggaggctgacttccttggtggcatggagtgcacacttggccaggtagacagaagatgtcttttgtctcctccacttcaggccttcctcccctcttctgatccttgctctcttttcctttagtggtcattttctttaaactacagcatcttccaacatttcctaggtactgttatatcagttatatgcacaagagatcatgcaagtatatgcagttgcttcttttgtagagttaataaactctcatcctgaatgtcctcattgtgtcggtcatgtatacaacaaatgcagatctagcacttactacatccgctatccctgtgtctgttagagccacaccaccctgtcccatgacaaatttgccatctcctaaatgatctggaagattcccacacatagactgttcctcattcaaatttatgcaaagtctccggagacaaaagttaaaatgacccaagattaaatagatactgtaatttaacccctaatgggaatgtgacatggattaagttctggataagggataaaaaagatccagagtgcttaagtgacctaccagtggttctcaacctgtggatcttgacccccacaagtattgaatatctgatatttacattataatacataacagtttcaaaactacagttatgaagtagaaataagaaaatgttatggttgggggtcatcacagcatgaggaactgtacgaaagggtcttagcattaggaagggtaagacccactggtgctaacagttcacccttgtaagtggcagagtcagtgctggccacaaagcccatcattttacttccactggcctttcctgtctatcccctctcaatctccttttgctgtacccagagtgcagtggagcatttgtaagaaataagtcaatggtttagactcagttcaatctcaaaatgctgagagctggctttttattggtctgagaggttagtgtcctcaaaccctgtggctagggacccgagaggacatgagaatgagccagttgtgcggagtctgagaatccggtctttatgttttgggttggtgagaagggaaagagaggtctggcatctccaagcccagaagctgtttttctggatcaagtgttccttctgaaactgcagagtgaaatataattcaggttttctgtttttgcaacatcagagcccagtgtatatgaatattcagttggtgaatgctttcaagaattctatggtagctggtttcttgaagccttgggcccgtttaatgtcgctggtttgggggtacaggtttcctttagaagagagggatcaaagtacaaaacctgttctgagcctccaaaataattgagctgtgtggaaaatgaaagtgcagtccacgtgctcaagcgcatcactgtgtgtcaggttctgggcccctaccctagtgtgtgggccttcaggaaatggaccaaactttgtgggaaaccaaaaataaaaaaatgtggttcagggaaagcagaggaaggaggggaactctccaggaagaaagttgtgtgaacaagtttgaaggtcaggtgagtgtgccaggggtgtggcttaggagagcctggtgtcagtgagccaggccagatgcctacttcctgtaaaccactaaagattgaacttcaaagctctttgcagcccaggcctcctactaaggctatggggtacattgttatttgtagatttgcagggttttgtcacaaagagggactccaaattatagaagcctaatgttccagcaaacctacattcccttcctgcctcaggaagggaaaactctgaggaaaagtcagcctagaaggcaagcctctgtgttcccatgtgggtgcttgccctcctgcaagccacttgctggaagacatttctcccagtggaaaagagaggtgactcagaatgcccctgttagccttttccaggaaatacagtgctcgccttcacaggaacacactatattcccttaaagaacgccaaaggccagatgcagaaattctcccaaggagaggcagagagagaaataaaggataattaatagaatcagcctgaagacttctcaaaagacttaatgatagagaattttagaattttgctgagacagccaccttttcggtacaaatgaaatgaatgacttatggattttgtgtgtaactttgtttaaggtttttaaaacaagcggtcagctgtaaaaattatatgtatgggaacctttagatgaactcagcgggttgaatttatgtgcagtaacacacacacacatgcatacatgcactggtatgtttatgtgtgtgtgtgtgtgtgtgtgtgtgtgtgtgtgtgttaatataataactgaagaagaattcatgaatttgagagtgagtaaggagatagcagaagagttagttgtaggaggggtagaaatgatacaaaacaaggttttaaaaatgatggttaaaaaaatgatatcattatatacttcagtgagcctttccaagattctgcctcagactctgggcttcttttatatagatataagttgtatttatcacaggaaataaatgtagatctatgtagaagtcacaggataaatgtctttttcattcaattttttaaaaataattttgcctgtgaaataaccctgaactttagttccttacaaggttcatatttccaaacaccagcaggtctgcaaccctggtttgcactagctattgcactagaggtcaacaatataaaagcaattgaagacagcatccctgtcttcaagctggtcaaatctagtttagttgtagttggggaagcaaagggctgagcaggaaaattacaactattacaaggaattgcagaatataagcctggtcactgggaggcattaggtgtgtgtgtggatggtggtagtctggagtaagggtttccaaggacagtggcatttacactgaaataaggagaagaaatcacatttccccactgatggcaggacaacatacaggcctctagatttaagaatgagctggccattatggtaaagagcttgtttgcttgattttgtcaagacacgagctccgaaatcaggggcgaaaagagtcgagacaccagaatggcatgaagaagcaactccatggaagaaaaacagtcctcaaggatgtatggtcaagccagccaccatagtgcatacttggagctgagttctattaggaacattctggaagccagtgcatagaaacgtcagagtttgcgccctagggatgaggaaattggctttttcacactctggctgaatctgttctgagcagtcattggtggagggctgctccaaggctggggacgtcaaactcccagcattcctagttggctgcctgggtagcaaaggaggctttaagactggtggaagcttaggcaaagaagtgttcagtggctgatggtcagaagttagtaacttggagtcacttcgtgggcctggcgatagaaacagaagctcatatgcgagttcttcagttcttattacggcttgccatgccttgatcatctggggatcattatttttgccatggggccctgtagagaatagctccgtctctaactcaggagggaatcctgactaagctcggctgcacttctcacccctccgcctgccagagttgtggcttagggctatgcctgtggccagacctaactagtaaagcatgagggtgttatctgaaagctcctagcctagagacacaaagactgtttttctctttgcctgggattcctgggagattgtggtagtcttgcagcatggcttggggtatgtgtagccctcagggcacctcaagctaaaaatcactatggaggcacagggttgacatgcagcccccacccccaccccccaccccaagccaactccaggtgacatgttggcctctgttgatgacaatcacctcattattggccatgagattagtagaatttgctttcctgacacatatgtattcagcatcacttggcttcaggcaatcaaagcatcctttgatgatgatggtggtggtggtggtgatgatgatgatggtgatctccttaccaccagccactgaactttgtctgattctagggtggttggtttaggggaggcaatgtaacattcatgcatttacttagtcattcagtaagcatttaccaggttccctggacatgtcaaatactatgcttggtgctagagatacaaacacaaagcagacagagactctgtccctgagaagctctgtaattacctaggtgacaccaacctgtagataaatgaccaaagtacccatggttaaatgctacaattaaaatgtgttccaggagttgtagaacaaagacttgtctgtccagaggaaatcaaagagaactcacaggaacgatgactctgaacctgaaacatgaactcaagagcagttcaccagcacaggaaataaagggactttccaaaccaaatgagcagaacacacaaagacacagtcacatgggacgttggggtgatggcagagagacctgaagagactgggtaagcagtcagatgaggatgggaagaagatacagaggcaacacctgtgaggaagagttgggccatgcagccttaagtgcttagacttgatgcactgagtccttggtaaccaggggaaagacgagattggatgcaagtgttagaaagagcacttcagtatgctcatgaaggctgcgtgggaacagagggatgtggaggcaaggatagcacttaggagacccatgtcatcaaaggcgtgagggggaaccacagtgaaggagacccagaggaggagacccaggggagagtctttggtcagcaagtttagaagagtagggaggggggtgactgcaaggtaactaagaggatcacttcacgctccctgaggagaatcatacaaggaaggggtggggcgccctgtgtgatactgacctaactacgctcaggactttgtgcagaaaacagggggtagggggggttgccagtggctgctgaccacttgagtgtggagtaaaacaataccgcgttagcagatactcctgacagtgacagtgagtagcaccgaagtggtcagcgagcccgggatgatgcaggttttcatttgtggaaggggatctgttgagcttaccatgtttgaatgaagcaaaggattgtttaaagctctctggagatgaaggccaccctacttcattgtctttcagagaagggaatgaacttgacgtcttaacattgtcaacaaaagcctttctttgttgagtgtcctccggtgcattttccctgagtgctgggnnnnnnnnnnnnnnnnnnnnnnnnnnnnnnnnnnnnnnnnnnnnnnnnnnnnnnnnnnnnnnnnnnnnnnnnnnnnnnnnnnnnnnnnnnnnnnnnnnnnnnnnnnnnnnnnnnnnnnnnnnnnnnnnnnnnnnnnnnnnnnnnnnnnnnnnnnnnccaaaagtcccccatacccacccacccccaatcccctacccacccactccccctttttggccctggcgttcccctgtactggggcatataaagtttgcaagtccaatgggcctctctttccagtgatggccgactaggccatcttttgatacatatgcagctagagtcaagagctccggggtactggttagttcataatgttgttccgcctatagggttgcagatccctttagctccggttgcagatccctttagctccttggctactttctctagctcctccattgggggccctgtgatccatccattagctgactgtgagcatccacttctgtgtttgctaggccccggcatagtctcacaagagacagctacatctgggtcctttctttttcttcccctcaaaatatctgctctctcaagtatgaacaagcaaaacaggaaaaccactaccacggtccctcttgacatctgtggtggtaaaaggaggtgttttttgtcatgtatagctaaggcaggcaaagaatggctagatgtcagctgggaggatgacacagccggtgtgtcccaggtggctccttaaggcttgagtataagcgctgtgggctgtactgtttaatggatcctcaatggcctcaagcattctctctcagtgctcccaggttctctgtccaaagacaaactcttcccactcttaaagccccatttcttcatctaccaatagagagagccgtattgctgagccttggcgatattgtgagggttggtctggagggatagctcagttcatgcaagcataacaggataacctgagtgagatcctctctgaaccattggaggagaggagcctgagtgcgggacatgaacttgtaattttagcactgggaaatggaggctcaggagccaaccagtctagcccagctggtgagcttcaggccagcgggagaccctttctcataaaacaaagtggacagctgcctgagaaaatggcattcaaggttgtcctctggcctccatatccatatgcatgtgcacatgtggaactctcaggtacacatgtctatatatatacctgcacacacaaatattcacctatgaacatacatgctcacatatgattacccacacaatcagtgagtcaatacataaaaaatgctgagctgagaccctgatataaagaaagcacttggagtgttgttgaagatgtctgagtgccgttattcatgtggtgaggatctagggaaagatgggaagggtcagcctcgtcaagggaaaggaagagttataaagaacgagttcccatgacctgggcagccaccaatactgaaagtataatttcagtttgttagtgatctcatttcatccagggattcaaggtacacattggctcatgtgaatgcttgccctagcatcagttcttttaggataatttgtgtgtggtggggagaggatggttttaaaacagaatgttgaagcctgaaaagttggcacactcctttaattccagcaataactagagacagacgactctctctgagttcgagaccagcctggtttaaaagagtgagttctgcaacagccaggaatacacagaaaaatcctgactggaaaaaaccaaaacctaaaccaaaccaaaccaaaccaaataaacaaacaaacaaacaaacaaaacaaacaaataaaaacagaatgttgcaataatctgggtagttattctaacccttaacccttatcttactagaactaaagcccacaggaaacaaatgaagtgaattcaccagaactacacaggaaatcacatgtgcagcctgttccctaccccattccccaaagccctaggcttccacaggtgcttggggggatttgagtttgagatgtgcctactctgccatgaacagccggacttttgctttacagaaagaaaagctgcagccctcagcaggctaggaactggcagactgtgcagttgggttcaagcacagcaagtgactgactgcacagagccaaaaaaaaaaaaaagtgcccaatgaggccatggaaggttcatgtcctcagagaggcagagctgtacattctcagcagatgggagaggggggtgagtcacaaggacacagagtgatcagaaagctgtgctttccttctgggttcctaggaactcggagagcatcctaccccaaactagatgcacagctaagccatcttgtgctacaccctaccaagggttcaccagaaaagacaggatacctcaccacctacaagagtgagctgccccttgccctggcaatttcatgtcccttcttcttctgttgtttattcactcattcacccatttctagatgtccacctctcttcacacaccaaggcaatgaatgatcctaaggaacaaagatgacttcctcaagctgcagggatagggagttactatcccttaccacctcaggacccagaattgagagacactggccgctactgttactgacattaagcagttgagagaaatgagagcaagaggacaggaacattgtcgagagccacaccgacctttatggttctttccatttattctagtagctagttcatcactaaatagtatacattagaaagcagtattagtgcaaagccaagttggagttgactttggtagtgtttggtggacccttttctctttcagttaaatttgttttatggtttatacagaaggaatatagatgacctgtaaacatttttttgtacaaacatgacattagttatcctccctcagaaaggacatttgctttaagaatatgatatagggactggagagttgactcagcaagtaggaacacttgctactctcagagagggcctgagttcatttcttagtacccacgttgggcagctcacaacctcttgtaactccattttcaggggatccaagatcctgttcagtatacacataattaaaaacaaaataaatcttaaaatcaaaagacctcagcatggctctctgaaaaatgttggagtgactgccaatgtcttaaaggcagaatcgtacaaagtcaccacccaggggcatccccacctggccaggattccttctgtgttcagtcatattgaacataaacattgcctaagttcttagaggcattttctcttttctatgggtcagcaacatttacattaagtcccccttctttattgccatgtggctgcccctcagtgtattttattctccagaatttatatctgtctgttaaaactgagaactccgtctgtgagccatctaggggtgctggtcttggtggcacagggttctttggctcctgtttgtaacagaaggatagcatactatgtgccacatgcatgcctggtgcctatggaggtctaaaaagggcatcagttcccctggaactggagttacaaatggttgtgaaacaccatgtgggtgctaggaatcaaacctcaggcctgtgctggaatgtccagggcttctgatcactggcccatctctccagaccctgatcccaaaacttataaaaatgtagattgattggcctatcctagagtgtctgatcccaaggatctcgtgggagacccatggtcagaatttccaggttccctactgacaccccttctgctgcaccagagactacctacactctgagaagcctgtacctgctagcgagtcagactctatcaatagatttagtgataaaataaaccaatgatgtaagaaattatctagagaagttaaggacccagaagcaagagcttatcatgaagttaacatttgtacaacagagtctgtacatggctcatgggttatatttttgatgtgcatgcatgtgtgtgtgtgtgtgtgtgtgtgtgtgtgtgtgtgtgtgtgcgtgtgtgtgcattcaggtgactgttgtaggggatcagtgcttgtgtatgtatgtgcttgtagagatcagagaacaatctcagatatcattcctagggcaccatataccttgctatttgagataacatttcttacttgtctggaactcatcaagtaggcccagctgactggccaatgagtgaaccccaaggatccacccttgtctccttttcctggtgatgggattacaaatacacactggctttttttctttcccacccctcctcttcttccatttgtcatgtgtgcatacatgcctttgcatgtgtgggggtgcatatgtgtgtgtggaggagcatgatcatccatctgcatgcagaggctcagagatttgtgttagaaggcatccttagttgctcttccatgctacacactgagtcagggtctatcattcaaatatgaaactcacccacatggctagttcccctagccagcttgctcatgaaatcccctgtctctgccttctgaaattgtaatttcagggtgtggtcccacattctgccttgccactggggtgtaggaatgccacttgggcaggtgaaatgggaggccttagactgcattttccctacaccgacatcgggttctgggtttatgggaagggccaatgcaccactcaggatgggatagcatagccttgggtgggggcctcagcctgagtgagaaatgacataggctgaggcagaatctggggttccctgactcccaggtgtccagtcactgctggaaacaacatggagttgggaatggaggggggccacaggcctgtgaggagcctaggaccaggagtttccaaactcccgaatatccagatgcagctggaagtcagggggagttgggaatggagtaggcccatgggctaagagcctggggctggaggaaggggaacaccagcttgctcagtggtagagagtccagaaatacagaaggaccttctgcagttcagtagacaaaggctttcaccattctccccatggctggtcttgatgagagagacagtccttggtttcaaactgtttattgactgttcatcatggaaaatgagtgcatgccacttcctcagggtggaccagaggttgaataccttttggaggaaggactgtctggaaagggaagcttattaactaagccctcagggccaatctagatacctcattagcatggagaacgttgttgtgatctacttgaccattgatcaggtccctatgtgaggagtgccaggtcaaggatctggtagggaacagagaaactcctactgtcctcagatgggtgccgtgccagggtttctgaacctactcaaccttaccaagtttcctggcatgatccactgccccacaacagtatcatgcccaccccgtgttcacttgggtttcatatggtctaaactctggtccacatacttgccttgcaagctctttaaccacaagacatctcagcttgatggagatcttggctgccactacgtatttctgctatccattaaatatagtcaaatggacctattatccagacaatgggttttcttcctgacggagatggatgtccagatgatatcagctcaatggcccttgaaaagaccgatagatctcaagttgtcacagtctatgggaatttgatctagggtcaaagtgtctccatttgtggacgccaaaagtggcatctgaactcactgtcatgcctagagcaagattctaagtcattttgttcaataatatctacttcttttgtgcattaaaaatgatgcctggggaagttaaatttacatattacagcaagcaactcatttcccctttgtttctcagagacaaagctttccctaattctgcagaaacactgcagtggcacctgcatgagtgagtgatgtcataggtaagcatcattccttcagttcccctgatgctgtggaagcctggcaaacagtactgctctctagtgttgatgctctgctcacataggatttggggtacttgtggggattcaagccccaacctctccaaggacaataaaatcctttctttcctttttttctttgttagctttttcaagctagtaaccttaaattcaaactctaggaaatccccgcttcctctggaagtcttcccttagagctttgcacctcctttagagggtctgcaattggagtcatgcactgtacatcaggtggctgccacccaggccctatatggcttttgccaagctgtttaacatctctgtgacatgtgggtcatggacttcatctatctgttttggaaggttggggtcaactcctttctgagttccttcccatccagtcagtggctgtcaatcatttcttgcctttcacctcggaaacaaagcattttttttctgtactcattcatttaaaaagtggtctcccaagtccccgccacacagcccacatgcacccctacagcacatctgtgactcagcggttccatgatgctaagtactagatgacattgagtaacagacagatggcattgctctaccctagcactctgcttccctagagaaagcaatcctgtgcccattccatttcaaagatactattaaaaagatacatgcagtggcaatttaaatgggattatgtttacgggccctatttcatatctattcagctatttaatacctgtcttagccttatttgatgcagaggaggaggctaagacagctgggactgaaagacagtttgcaagaacttccacctcagtgccgaaaaacagctccaggtatttgtcctggccttaaccctttaagccaggctggtacaaagcactcagcacccagactagcttacccaggcaaggaaccacttagtgcctacacctgagtccacctcagcttctgctttttcattcctaaccagctttccttagactctcgagtccatgtagctcagaactggctatccatgcagcctggccctgtctctgggatgtagcacacatgtcccaccacctgccactcatctttcctctgtatgtgctgtcttttttttttttttttttttttttgatggtcttcatctcagagctctctttttttttttttccattttttattaggtatttaactcatttacatttccaatggtataccaaaagtcccccatatccacccacccccactcccctgcccacccactccccctttttggccctggtattcccctgtactggggcatataaagtttgcannnnnnnnnnnnnnnnnnnnnnnnnnnnnnnnnnnnnnnnnnnnnnnnnnnnnnnnnnnnnnnnnnnnnnnnnnnnnnnnnnnnnnnnnnnnnnnnnntccgtctctgtaactccttccatgggtgttttgttcccaaatctaaggaggggcatagtgtccacacttcagtcttcattctccttgagtttcatgtgtttagcaaattatatcttatatcttgggtatcctaggtttggggctaatatccacttatcagtgagtacatattgtgtgagtttctttgtgaatgtgttacctcactcaggatgatgccctccaggtccatccatttggctaggaatttcataaattcattctttttaatagctgagtagtactccattgtgtagatgtaccacattttctgtatccattcctctgttgaggggcatctaggttctttccagcttctggctattataaataaggctgctatgaacatagtggagcatgtgtctttcttacctgttggggcatcttctggataaatgcccaggagaggtattgctggatcctccggtagtactatgtccagttttctgaggaaccgccagactgatttccagagtggttgtaccaggatcaagttgaccatctaaacagtcccatatcacctaaagaaatagaagcagttattaatagtctcccaaccaaaaaaagcccaggaccagatgggttaagtgcagagttctatcagaccttcaaagaagatctaattccaattctgcacaaactatttcacaaaatagaagtagaaggtactctacccaactcattttatgaagccactattactctgatacctaaaccacagaaagatccaacaaagatagagaacttcagaccaatttctcttatgaatatcgatgcaaaaatcctcaataaaattctcgctaaccgaatccaagaacacattaaagcaatcatccatcctgaccaagtaggttttattccagggatgcagggatggtttaatatacgaaaatccatcaatgtaatccattatataaacaaactcaaagacaaaaaccacatgatcatctcgttagatgcagaaaaagcatttgacaagatccaacacccattcatgataaaagttttggaaagatcaggaattcaaggcccatacctaaacatgataaaagcaatctacagcaaaccagtagccaacatcaaagtaaatggagagaagctggaagcaatcccactaaaatcagggactagacaaggctgtatgtgctgtcttgatgcccttctcagatgtcagcatcccgagtcccagataagaatacactgcccttgtcccagtgtggagccggaagccactgtatcaccatgaacagccttgtcaataggccagatcactggtttgctaaacctcagtaaacaaagctctttaataaataatgtttcctctcaaaccattctcataaaaaaaaaaaaaccagttttctgaactacaaattttaaccttataaagtttgcttcaattatgttaaaacgtgaatatttctgacttcttcaaattatgaatgaaatttaggtagtgttgatgatgcgcctttcagaatacctaacaagtcataagaatattaaacagtgtctcatattttctttcaaaaagggagaaaaatatggtggtggtcagtaagcttccagtttgctcaaaggacaaaggctagggaggatatgtatctaggtgctaatgatggtggcttcagggttgtgagactatagctagtgtgtaatgtctcagctgtgtttctctatactttttacaatgaatatatagtgcaattatgatttaaaaaaagtacaacaaaggatctcaggagttcatgagttgtgtgtgccacacaacataagggctggagtttgggtcccaggcatatacataaaatccaggttaattggtgtctctctataatctcagcactagggacaaaactctgaagcttggtggccaggcagaccagactaacagtgagctccaggttcagtgaggccctgtctcagaacaacaacagtggagagcaaaccaggattgtaaaataccacagtggtcaagtaggactatcatcccttttatttatttaacagaagaacttgtagtctctggttggctcgagggtacagttcatgtcttacttattgttttattgccctgagagacaccatgatgaaggtaacttagaaaaggaagcatttaattgaagacttgattatggtttaagaaggtcagtctgtaattatcttggtgataagcagacaggcatggtactgaaacagtacatgagagctttacatcgtgatacactggtttcaggaagagagagaaacagaaacagagacagagagaggcagagacacacaagacacacacacagagacagagagacagaggcagagacagggagagagacaggcaggcagacagatgatagacaaacacagacatgtacctgtatacacagagagagagagagacaaagagacagagagaggcagaaacagagagagacagagactgagagacagagagacagagagagacagagatacaccaagacatacagagagagacagatggagagatggggaggggggggcaagcagacagatgatagacagacacagacatacacctctacacacacacacacacaaccatataccacacatattcacgcaaaaaaaccaaacagtgagtattagtaaaaacatcctgaacatccataaataagcaaaagaggatgggacatacattataaagattcttaacctccccacctcccacatatataaatgtccatgtaaatgcaaatacacatgcaagaactacagagaagagagagagagagagagagagagagagagagagagagagagagagaaagagagactcttaaaccattgataaatgtttacaatatatgcagattttcagcccaggatgtcagtagaaaagtctctggagtgcattatttgtaagatttttgagaagtcgtcctaagatgcttttgagaaaaccttggtccccaacactctgcccatgggaagcagaaatgacccagctaatctgattctgagcttttgtaatattacttttggttaccgaagagacctaggaaggcccaggacactaataacaaatagcttaagaaaccagcattgcctctgcaaaggggttgtgagattctcccagagctgatacaagctgaatttgagaaacataatatttgtattttgaattaatctaataaagtttagaggaagaaaagttacctgcttggtttacaaagtcactcccaagagtcttagatttagatcccaggacaaaatgaggccaggtatgaattaattagccttgcttcacatgaaacgtgggcctctggggcttctctgtgcaccagtacaggtcgtccaaggtgcacactcctgagtcccagctcccaaaggcccagagtaagctgactccagccctgtctcctacttccttagcatctgcccacacggaggctcagggcaagactcttgacctcactagtcagagaaatgaaggagcagaaatcctgccaacccctctcccctctgttgaaattcaaagcaagaattctgctgttacaattaatttgctgacagggccctagtggaatcagacatctgagaactgaggagacaaagctctcttcccgctgaggagtgtgccctcttctgaacacttctgtggaaggggactgtacactctcatgagagagacatataatgagactgtaccctgtggttccatttgcctaggccatattaacttaaacacatcatgttgttttaattaaacacatttttctttcatttttaaaatgccccactttgaacaacataattttgtggctacttcatagtaataaatcgcttttgtagctgaccagttcagagagctgatcttaggtctggctggcacttatgaccctggtgctcttgatggtatcatagttatcattgctaccatcacagttgccatcatcatcatcgtcgtcatcattgtcatcactagtaccatcatcaccgtcaacactatcaccaccattagtcatcataaccatcacatcatccccactaccacagccattaccatcaccatcagtgctgtcaccaacatcaataattaccactatcatcaccatcactatcatcccccaccataactataatgttatcttaatcattattatcaccatcactaccagcagcagcagcagcataatgatcactaccatcattgctacctgtccaaccatcatcatcatcatcatcatcatcaacaacaacaacaacaacagcaacagcaacaactacaacaacacccaggcaagaacagaagcctgcaaactggcacagcaaaacttacatgagacatctggattcatggaattccaagatgctcttctcatattcctaatctatattacatctgccctgtttcatatccttaataagaaaactattaaaacagttttaaaatcctcactgggtttctctaagtgttagataaaaagaagagaaggaggaggatgaggaagaggaggaggaggaggaggaaaaggaggaggaggaagaggaggaggaggaggaggannnnnnnnnnnnnnnnnnnnnnnnnnnnnnnnnnnnnnnnnnnnnnnnnnnnnnnnnnnnnnnnnnnnnnnnnnngaggaggaggaggaggaggagaagggagaaaataaagaccgatttccattaaaccttattctatcatgaagtattgtgtcaaatgagagcaccattatctctaattgatagattagagacaagagtcagcaaccttggaagctcaactccttcacccaagatcacactggagtgtagctccaattcaaaattaagatgagttgatttcaacatggactctgtattccatcacatccctcaaatcaaatggaatgcgattttatttttaacgttatttactgtaatttatgtgtatggcatgtgttctgtctgtaggcatatgtgtgcactctgtgcatgcctattaaattccctggaactggagttacaggcagttatgagtctccatgtgggtgctgggaatcgaaccccagtccactgaggagcaacaagtgtttttagctgctgagccattctctccagccccaccctttgtaaacttaacccaaaatgtgctgttcttcctgaatgctgccactgtgaaagtagtcaggaatgcctagcatgggacactttattccacaaggtggtagattaatcgaggagtatttctgataaatattcacagatggagtgccagagagctctttatgctaagaaaaggcttttttttttcagacacaggagtcagaggatttaagcaacttggagtatgtttgccatgttcagtcgtggatatgttttgtccatatatttattcatctcttattgaataataagtttactaaatgctaacagtaaacacagctagtgatccacccagaaactttgcaccaacttacacacatccctctactacatcttaagtaatagctccaacatctcctttctgaatgagtctctctttgaagcttttatcatcacatgaatgagaagacagaccttgtcatgaattaaatgccaactcccccacatagacccttccccagccatagatgatcatggagaagacagaaggctgaatgtcatccccccactccaccatggacctggaggttaattccacactagtgggtttgtccaagggttgggggtaaagtacattatgatgatattgctaagggctcagcctagatggctggctcactcttagccctgccttctttccctttcttataatccatgtctgttctttcttttccattcattatttatgctttggagatttccaggccaggacacttcctcaaatatccaacaatataggtaacaactccaaggataactcacagacatctcagagccaatatccccaatccaagctcactgtcttctatcacccatccttcctctagtggggtccatgcagtgaatggtacctctatcttcccagatgccggagaaaggaaacctggaagccctccatcacctcccactccccagcccacctataatctgatcatgagaccctaatcaatcttcaattgattgaggtgtcttcaatgcctcacacacatcctttctacctctggaccccagtctaagtcaataaatagaggactgtaattatctctaagtagggactgactggatgggatagaaggcaagaaatcattttcaaagcacctgttgtctggttgtggaatcttgtaaatgctcattatgcatttgagaaatatgtgtgatagataatattatcatgagttcacagattaggaaactggggtacagctgatgaagctccttaaggccccacacctgggcttgcatctacagcttccttgcagttcttggcgtagaaggtatagtggaaggcccaacagtctaatgaacatggatgctataactcgattgtctagattcagatcccagattcccttactggctgtgaaagtctcagtaagtcagctttctgtcatgggctaaatgatagccttcacaacttttgcccatgtcctgtgagcatgactccaactagcaaaagcctttatcgtttgaagtgaatgatctcaagatgaagagaccctgagtgagccagacgagtcccatatccattaacacgggtctttgtgagagaagaggagagggccatctaaagaaaaagaagagtaaatcagttctcagggaaaaaagcagaggaacagagatgccaccagaagctggagggacaagattcagagtggcccaagatcctctgagaaaacatggccctgccaaccctttggtttcaaacttctgccctctagagctccataagagtaattgctcttgctttaagcttcaggtctgtagttctttgctagatggtcagccttagcaaactacaggctctccacgcatcagttctcacctgtgtgtgagcatatagcagtgctttaatggccatcatgagaactaagcccattagtacccacaggccctttatagcagcagctgccaaatggttgtatttagtttgactcttaaatagttagtatgtgacttttaactggtaacaataaggacactctgtctacctcaaagttgggttaacatctttcattttaaaactgcaaagtctatagagtccagctctacagactgccaatgcttgattgctagccttgccgtaaacaagctacaacctgccaaaggcagtggttgaaaagctgttgcctgcccttcccttttagaatgttatggactggacactgagctacgtgaacaaccctttcttctttccctgcttgcccatagtgtggcaggcagggtgggatgagggaccaagtggcttttgactagtctctatactgagtcatttgggatggtaatggagccatacttagtaacaaagcaaaggtgagtaattagtgctcagaaggattgaaaccttaaatccctctccttcactctaactcttgctaatgaagtcagagaaagggtaaaagcctgtaattacaccgaagtaattagaaccctacttaatagaatgcttaaggcaggaagcccaaaccaatagatcacccattgctaccattacctgctctgtccttctgaatcatcctccctaggatggtccatttaaagcattggttcttagcctccctgacgctgcaactctttaatacagttcctcatgttgtgacccctgaccgtaaaattatttttgtggcttcataatttcagttttgctactgttgtgaatcgtaatgtaaagacctgatatgcagatggtcttattgctatccctgtgaaagggtccttcaacccctaaagaggtcatcatggcccatatgttgagagccactgacctaaaggctgaagactatatttagtttgtctaagtggcacaggcatactgccaccatctctcctgcatgctcaagacagcttcagaattgtgtttttctagcgtgacttcatgatacccgcctctaattccagctactcaagagactgaggcaagagactctcaaatccaaaggctgcctgagctacagaatgagttcaaggataacctgggccacttactgagagcctctctcacaataaaaagtaaaattgaagtagaaggacgtaactcagggataaaaaagccttagctttatccccaaaaccaaagatgggggaggcaggttgtgcctctcttaagtgctacaagttttcctccttggtgaagtcccaccaggacaacttagtttaaaaggccctttaagtacacctttaaaatcggatcacattatgcactgtagtaagaatttggagatttgggtgggttttgttgttgttgttgttgtgttttgttgtgttttgttttgttgttgttttaaaacacagaaatattgtaagaatgtattttgttttaatcctaggtgtgggatgcgtggctgcttcaaattgtctacagcagctgactatgatttgcctcgtgctctaacaggggtgtgatttttgtcagctgcagatagttcctgtaattgtgtgacatttggaattttggggactcttcagaagatatatacatgctaggaacccccagaagtggggtaggttgttgtttggtcgttgttggtccttgttggtcttggttcatgagtagtagtgcacaaagaagaaataaagagaaaaagaaaatatatatcctgatggcaaaaatcaaacttgtcccaaggacctcaatgccctagtcaacaggaagtattctaataacaatattgcccccttcctgatccccaactttatttaggaattctctctcctccactaccttctctctatccttctttctttcctatctagtgttaaagggttgaatggttggaagaagggtggggaacggtggaagaaagaagaacccacaaagtagcaaagccagctacagtgcactgaagttatttgtctgactgtattcttactttctagttcaaagaaaaggagatggggtgtttatataccaagttcacccatccttgtttgaaagctgttcccaaaagtgtagttcttcccacttcctgttttgtgtatctgtgggcaggaagtacgagtgacaggcattttctcttcctaggtgactcagctatagtccagattagaccaggttaaaagtagataaaagcaggtttattaggagtcacctctagggtgggttcactgatctcaggggtgggtgtcagtgaagtcacacatccaggctaaagcaagggggttttacagagtgatgaagtgccagccaggagctgggattgtgtctatacatagttaaaaactgagctgctgggcggacactcctgggtgggttgacagaagcacagagatgaggagtgatggcaggttaacccaaagttttctccaaatggatggggagattttttttctgtggggttgcaggaaggagttcgttcaggtggtgcttaccatcttgtgcaggaggtgagcagggttccagcttaacattctgacctctttgggtatagggatgccaattcagatctggctacttcctgctgaagaggggcagagtggtgtgggagagtcgggagtctatggggtcctgctcagccgccaggtgtagaaggcttggttgacctttacttgggagaccatgaatctgtttctgaaggaagaggagcaggcaaggtgctaggagaaaaataaaagacagattagtatcatcagccctacaaactgggctggacatgtgaaaagtgaaaattgtcagaaagaatggaatggagatgtgtcctgagagagcagtctctctgtctctgtctctgtctctttctctctctgtctctctgtctctctgtctctgtctctttctctctctgtctctctgtctctctgtctctctgtctctctgtctctctgtctctctgtctctgtctctctctgtctctctgtctctctgtctctgtctctttctctctctgtctctctgtctctctgtctctgtctctgtctctttctctctctgtctctctgtccctctccctctcctcctctctctctctctctctctctctctctctctctctctctctctctctgtgtgtgtgtgtgtgtgtgtgtgtgtgtgtgtgcgcgcgcgctcgcgcacacatgccagagatccaagttgagtgccttctttcattattttctaccttatttgagggaacaaacccagaactcactggttgctctaggctagctggctggtctgctccagaatccaccttcctctgcctccccatcactgagatttctggcccgtgctgctgggcacagcttttagtacatgggtactatcgactggcctcgggtcctcctgtttgtgcaggaagcaccttaccaactgggctctctccagccctgggcactgtccttcctttttgcagcttcccatcttctcgtgtgtttgctactacaatttctcggactacacctaacaaacaaaaacaaaacaaagcatcctggcagaggacagggaagctgccggaacctcttgggctttcctcttgtagagctggtcaatcttcctacagccacacttgatatctctgtgctcgaaggctttgggtggtactgactgtagaccaggactttgttctccggagcctttagatttggagacgtcctttctacggtttctccacccaccactgtttgaccccagggacactgtttgacacaagtcataggcctaggggtctccacttagactgagagatgggcaaagctgaattccaaccctatcctcagtccccctggggtgcctgttacgaaatttatccaaattgggactgtctcaggttttgagccccaaaacaccattgttctgtggcctggcttcagtaaatggctaccagagagcatttatttttattattattattattattattattattactactattattattaattactattacatattttctttatttacatttcatatgctatcctgaaagttccttgtaccctccccccactctgctcctctacctacctactcccacttctcggccctggcgttcccctgtactggggcatataaagtttgctagaccaagggacctctctttccagtgattgctgactaggtcatcttccactacgtatgcagctagagacacgagctctggaggtactggttagtcagagagcattcttgatgttagcatcctccatgatcttagatttctccttacatatgggcaacggtctgaactcccctctatccaggtttgttgggaaccacactctcatccctctctctatagccaatattttatggcaaggctctactagtaagtatggtcctgccagcggaccccattgcctccaaggactccaatcctgaatccaagtcccctgttttggccaagccccgcctccaactccctcgtcttcgcagcaacatacttatttcggctgcaatggcttctccgaaccaggttgttaatctaaccctccacagttatgtacaaatcatttgtctgcgaatttgattccaaattccagagtccgattcttcagcccactctgtcccccacatggctgtggcacgcaggcttcctttcagtttgccctagcaaatctttagaagcaccccctcctcctctctccttgctcattggacaacggcatactcactcccatatcagccccgcccactctgcacagtccagcctatcccagggtgaggcctcaatgctgctgtattgaacaccacagcttctccaacacaccttaacagcctgtccctccaggagctatggctttcttaagcctatgcctggttcacagaactgattttttcccttaggcctgtgtaggaatcttcacccacctccttccaacctccccagtcttcagcaccatgggtctccaaacttgatccagctcctccaccactccaacagtcccacccccttctcacagacaaggctctaacaaataaaacaaaacaaaaacaaaaacaaaacaaaaaacaaacaacaaccaaaaaaacttccctcctttcagcccagtgcgcagctacccctcccttcctaaagctaaattctacaccattggctgttgggagaagcagaatccgtctctcccagggatgagtcaccctcatttgttgtccaatgtagagtggtcagccttgattgcatgtacacaaagacagcaaaaactgactcagattgtatctatacatagtcgtgcatacacatacatttataactatatacatatacacataaatatcaataatataacaataatcaaagaaaatggctatcaacttgagtgtaagacatatgaggggttcaaggggcggttgctgggaggagctagaggagagaaaatgactagggaaagagatttaattttacttaaattaaaaatattaaaaatgtaaccaggtaatggcagcacacaccttcaatcccagcactcaggaggaagaggcaagtggatctctgagtttgaggccaccctggtctacagaatgagtttgaaggcagccagggctattcagagaaaccctgtctcaaaaatacaaaacaaaacaaaataaaataaatgctataaatacattttaacagatttctctccacccttgtagcgtatgagccaatgtttgacacatataagatattcaataaatatttgcaactgcaccgatttcaaagctgattataaaaagaatcctgagaatgttttcactacaagcagcctcatgacaaatgcatgtctggtatccaaatgactatttttgaaatacagctgattatacacttgctacaacactggcttgagtgtttattttcctggctttggtcctatttgcttaaataaaactccaggctttcctaaaaaaaatgaggtctgtttgtttaacattgggctttacggaacatggagacctgtgctgttggacactgctgttttccacactagaggagtctgccctccattgacccagggctggctgcagagcagattcttggtggtgcaaatgtccctgtgctccaaccttgctcacccaggggcttcagcttccatttgctctttctgggcatcaccctcctgcagcatgcaaaggtctgcagctctgaccctgccacggggtaaacggaatcaaattcaagaacttgtgacaggtgcacccccctttagccttgatgccaagcaaaccttattatttgctggcctcaaatgtcagctgcagccagggtgggtccttgtcactatgactttctcattctaaggcatgacctgaggtctcctccagcctggtgcaaagcaacagaatatgtgtgatattggtttgggggggggggtttgcagtgaacagacttctccataccccagcttggcacccatgctggttttgcctgagagctccaagaatggcatcaacaatgacaggccattgcatgtctatcatggtcaccatggaagctttgaaaccttaatgattattcgtccttggaagctgagttggaggcctagagagtataaagtgggttgttatttggtttggttagtcacttggacgccaaaggcccactttctagccctcagaaggcaggagatagtgcacagtaactggttcttcacatcctggactgcaatgttggttgtgtctgcataagactgggcaaagggagctggggaaatggagtgtcaccaagggtgaggatctgagttttacttccagtgcccaagtgaagaaaataaataaaagccaggagtggaagtatacatttataatcttgagaaggttgaggtagacagatctccaggtatcactggccagccagcctagcttgactggtatgtaccagacccgtgcgagaccttgtctcaaaaactctcagacaggattgccctctgacctccatatgtgcatgcagccaggtacatgtgcaacttcacacgtaagaatatgcacacccacactcccaagactgaagacaatataccacggtccaacttggctcccatgtgttgacttctcttacatttgcttgaagcatggaaatatggatcttgtaagacgcagcctgtggggacaatccatctgcacctgtgagtgactagtagagtccctgaaggtttgttggaatcaactggaacctgggtaagaaaccaatgtaggcaaaacacaaggaggataggaagaaatgcctctgatagcagattaacctggaaaatgggaaacgtctcccgtcagatgttagcccacttgctgctcatagataatcagtgtttggtcattttttattatttattagacattttctttatttacatttcaaatgctattcgaaaagttccctataccctccccacacccttctcccctacccacccactcccacttcttggccccgacattcccctgtactgaggcatataaagtttgcaagaccaagggacctcttttcccaatgatggctgaccaggccatcttctgctacatatgcagctagagacacgagctttgggggtactggttagttcatattgttgtcttctgtgaggctatgccagtacctggcaaatacagaagtagatgctcacagtcatctataggctagagcacaggtcccccaatggaggagctagagaaagtacccaaggagctgaaggggtctgcaaccctacaggtatttggccatttattcatcttgtgttccccaccctcctgctgcaagactcattggaagaaactctgtgttccgtgaggtcaagtctcgttttgcttgtgcctattcttgatgtctggcccaaagtctctcatgcagtggtgagaagatgcctacagagttaagacatctgacgtagtggtgctctctgtaagtgggaggcttccttggagctgtcattgcagctaccattggtgtgaccagcaacactggtgtgaccaccaggtagtttcatgttggaagtgctctctactcttcagaccacagcccagtgatcaccacaagcacaggatcctgatggaagcattgctctgctcagcccgggaatgtcatttctaggcttcttcactctgactagaatactgatttttcagtactctagcagggagacaggaaacacaccatatgagaatgggttgtctcccaacctcacacagtgcctttctgtgattaacaaaaagaaaacaattacctgaaaatgctataactttacaaaagccagtctttatcatctcaatactccttgtttctagaaccagggtgtggcttttctaggtcttctagataaggacctatcaaagatgaagttagggtgctactgtccctgggatcagcttaggggtagatttcttcccatacccctgagctcaactgaaagtaaccatcagcccctttctgcatgaggctttatacaattcagttatttgtgtcccccaaaatagcacgagaaatgggagttcccaaccacatattctctctccactctccaggtgtgctgatgattagaagctgccactcaagggaggggctcacacaatagcaccacaccaggaagctagcatcactggggaccgggttagacagaggccgcccatcaaagatggtgatgttgcttcccttaagcacaggcacagcaccatctggactctcttaactttttcctttgggcatggcttatgtacacacacacacacacacacacacacaattgccactgtgtcttaccacgcttgcctttcacagtagaaaaaaaggtgggggcaatcagagggacaagcaagttcttctaagaataacttcagtgtgatgatgtagctgtccctgcatgcatgcagacaccgggtcatgaagagcacccaagttgcttgtctgagcattggtttcctgatgagacagatagctccctgatgtatatattgaaaatagaatccagaggttacagacccagaagttacgcattttcacctcctcctcccggcacctactttgcaaagatttgatgctaatttcagacgattccaaaactttgttcctgttaacttgatgttcacgttccacactgccctcctcgttctgatatgaacgtctcagcaacaattacaccacctcccaaatgagttatctaaatcccctttcttccagcacacacagaaggagaaagcaggggctaatttgtattcagagaggcccaggaacaaggccggactcataagtggacatagatggtttcaggtggagctgttgtcggtgaagcatcttgcagaggagaatggttaaagatagacctgaagtcacatacatagcatctcttctttctgtttccttttgcagattgtctcacagagaaagctctccaagtccttgctgaagcatgggaacacagcagggaaatcctccatcacggtaagctggccctgtagtggcaacaggtgtcagacactgtgcactcaccaatccaaaagggacactagggtaatgtctcctctgcctgctgggaactaactgactacccctggctcctctgtatgtctttttttttttctgccttccacctttttctttcttggtaaactattttgatcgttttacccttagagaaaatgggaaggaaagtagatttgaatgggagatcactcacttcttactgagagtttctgcaatcacaagatagagtaggaaagagaaaaaagaaaaaagttaactttgttgaacacagtgagaatatggaattgactaggcttttcagatagaatctctctctctctctctctctctctctctctctctctctctctctctctctctctcttattctcctattataatatttttgttttaaaaggatttagttcatggtttagtttgctgcccaagaagaggctagcctgagcagtctttattaagcaacagattggagctctgttgcttggttctatagacagtagctatttcagcaaatttagtcccggtttaaaataaaataaaataaatgcagctcctttgtgacactgttaataaataaattgaccaaaaatgaatgagtctagtgacttgttaaagaaaaggcaagtgccttttaatggttttgcttgtttgtttggttttggggggattgtttgttgtttgtttgttgttttgagacagggtctcactatattgccctggctgacctggaacttgctatgtagatcaagctagcctggaactcagagatatctgtctgcttctgccttttaaaggctaggattaaaagcatgcatcaccaagccaagcaaggaagcttttcttagtcactcctcttgatagctttacccacagcctgggccccatctcatatttcatgcccagggtttgaaagtttgtcaccctgctgctgtgtattctagtgagctcctgtccagagctggaaatggtgtatgcatgcataaggaatgtggagaaacgtcttactcaatgtctgtgtttgctcatttagagatcaaagcgacccgaatgtgctgctaggctcctgggctgaacaactcctgtgtgcttttctcctaggtgattgctgaagaattatcgggcaatgacgactatgttgagcttgcattcaatgcacggaaattggatgataaggtaaaatggtctgcattgacctcactggaggaagtaataaagccaagacacacagtttaatcagattcttcctcgaagctatttttccctttcaacccacattattaaacatatcaaagacttcagagaggtctggaaggtgaggctttccccaaaatggagaggcagttaagaaagaggggaagggcctgtaattagtacatgaccatttggtaacactaagtcttcatttgtttccaaacatcataggtcagctgtgcccaagaaaatatgacttgttcccaatcatcagggccattctaaatggaaaaaggctgtgagggggtagaaggatcacacataaattagcatcggtgtttgcccagttcagagttacgagctttgcacacactgtctcattagtcatttgtacaattcccaggtgaggggtagtatgactgaaggtgaagaaagattaaaagatgagtaactaaactaagctttctccatgtcacagtccagagcctctgaataacagacaccaaggctggataaacacaaggattgttatctgcagaaattccagtgggttgcagaaaggaaaagctgggggaactgacaggtcatgagggaattccaacccttgaggaaagagaaatgagcaagcatggatggaaagtctcctagaatgccacctacaccaaaagaggagcagcaaagccattgggaagttccagggctgtgtctcccagccaaggacctgccttagtgtcccctatgcacttccttactggacagagcagccctaggtagcctggccacagtgtgaatgcaaagatggacattagagttcagaagcctataaccctcagccagctccatgccctacagaaagagtttacaaggtatttccatggccactgcatcctgatagtggtaaagctgaagatccagtcccatgtcagtctatgcccaactagttagtcttgtgtgtgtgtgtgtgtgtgtgtgtgtgtgtgtgtgtgtgtgggagagagagagagagagagagagagagagagtgcatgtgtacgttgtgtatgtgtgtgtacatatgtatgactgtgtgtatatgagtgtatgtataaatgtgtatgcatgtgtgtttgtgtgtgtgagtatgtatgtgtgtatacatgtatatgagtgtgtttatgtgtgtatatgtgtgtgtacatgtatatgagtgtgtgtctatgtgtgtgtacatcggtgtgtgtatgagcgtatgtgtgtatatgtctgtgtgcatatgtgtgtgagtatgtgtatgtacacatgtgtatgagtgtgagtttatgtgtgagtatgtgtgtaagtgtgtgagtatatatgtgtacatgtgtgtgaaatacaaaggttagacgcccagcttcacctgatcatttctatgatttcccttcaaacgtatccttatgccaaaggccacaccacatcaggaattattgacccacttgctctcttatttatgagtttattcctttattcatcattcatttgccaaaccacactgggtgtctgttagataaaggtgctagggaggggatatgcttcccttgctgcaacctggacagcatcttctaagttaaatacaaattaaaaactacatgagatataatgttatggtgatgtacatgatattttaattagtgtgtgaataagaatgtctgggatatcagactttaatccttataagccgtgtgtgtgtgtgtgtgtgtgcgtgtgtgtgtgtgacaatatttaaatattatccctcaggagccatgggtcttctttttcatgacaggctgtcccactggctcttagagcatgctgattatgctggattggctggccagcaaaccccagggatccacctgtctctgcatccgccgtgtggaaattgcaaacctgtcctaccaaatctagattttttttcccctcctatttatttttaaaaatttttgcacacgtgtatcttgattatatccacctgactctctctcttccaggcccctacccaacaaacattttcctcccaagttcatttcatctctttaaatttaaaaaaattatagcacagtgagtccaattactgctgcctatatgcacacagatgtcgagttaccactgggacatgggtgcttactagtagccaaccctccatacccacagcaatgctacttgatccccaagaagctatcaactgtcaatacaccagctaacagtgaggtctagggagcccctccctcttcaacattgaaatttgtttgttttgttttgtgttttcagacagtgtttctctatgcagtgctggctgtcctggaactcactatgtagaccaggctagccccaaactcacagatgtccacctgactttgcctgctgaaatgctgagattaaaggcagtgccatcatgcctggctcaacattgaatatttttttattcttctctcatatagtacatcctgaccacagttttcccttcctcttctcctctcagtacacacccacaccccaacccattcttcctccttttctattcagaaaaaatcatccctcccttgtatatcaacaagcatagcatatcaatttgcagtaggaccaggtgcttaccttcctattaaggctagacagagcagcccagtaggagaaaaaggatcccaaaagtaggtcaaagagtcagagatagcccctgctcccactgctagtagtaactggcttggttatgtgcagctcttaggatgacaaccacagccactctgaattcatgtgtggaagagccatgtcctgtctagaggagcacacttcccagtgttcctccccataccccagctcttacaagctttctgtctcctcttccatgaattcccaaacactgggggaacagttccccatgatagagatgtcttgtctatggccaggcactcttaatcactaactctcaacacttggactagttttgaggtcctacattaaccaccaccctctgcagcaagaagcttctctacccaaggttgagagcagctttagtctatgatgtaagcatgagtgcttgagtctatgatgtaagcataagtgctatggtctatgatgtaaatatgagtgctcgagtctatgatgtaagcatgagtgcatctcgagtctatgatgcaagcatgagagagcatctcaagcctatgatgtaagcatgggtgattgagtctatgacataagcatgagtactctagtctatgatgtaagcaggagagcagctcaagtctatggatgaggacttagagtgcagtttgacacccatttagcagaacaacatcgtttctcccctagggctatgacttcagtggccatgggttttaaccacgcttataggaccagacgtgaatttccttttgtagagcagcccccatatccaatcaagagagtcattggttaccccataaataatttgaccattattataaaaggagtacatcatgtctagtagtttggtattgcagcatggagggctcagtgctggataagatcatcaacgtccattcttccctccagcagtctgcatagcacatttcagctctatgaaagctagctgttgggtagagaattccctgatcggttcacaactaaacactctgtgctctgcagtcaaagtgggtggtgtcttcagcaatagtcttgccatgtagttatcacatccaggtttttacacaggttctccagattaaacacagtcctcatacatactaagatacacaaacacacacacacacacacacacgcacgcgcgcgcacacacattgctagaacagaataacacagtacaatccttttcttgcacaagtagaaataaaattagcttctggaaattctcaagtaagattcctttctagatttttgctttaaacagttttgcgaccacttatgtagtcatcagatatattcactggctagaaatcaatgactaaaagcatctgtcatacaaataagttcttaggctttagtacattagtaacattaaagtaactgatttctgcatatacttaaaaactgcagcttgactatgtggtggaaatgggctgtatgcagttcatacaagtcgcaggaaatctgaatctctgagccgcgagtaaccctggtagcctttcagcatttaaacaccacaggtaaaaaccacactgctctacccacctgccttctctgaaagatggtgagactctgagatgtgaaatgatttacctaaagcaacaaatacacactcaaaaaacaagcaaatgaacaaacatcagggacagagggtgacccagtgaagttcctggttcacatataaattagattgctttcaggaggtgggacccttggctcagagaatcaggaagccaggcaaaggaggctgggtatatatgctggaggtcagcagttgtcaaagggaggtagtatgtccctgcctgcttccataggagtccctaaacctgtttccatagtaaccctaagacagcttttctcctattctcactctctcactcctgaacaatgagatgctctggagggtgactgagcctccctgagcacaggagcacatgtgagaacccgagctcctctccctctccttgggttgctgtgtacaaaccttagtaatactcacctcactggcttcttgaatttggaaagtacatttctttttcttttttttttccattttttattaggtatttagctcatttacatttccaatgctataccaaaaagtcccccatacccacccacccccactcccctacccacccactccccctttttggccctggcgttcccctgtactggggcatataaagttttcgtgtccaatgggcctctctttccagtgatggccgactaggccatcttttgatacatatgcagctagagtcaagagctccggggtactggttagttcataatgttgttccacctatagggttgcagatccctttagctccttgggttctttctctagctcctccattgggagccctgtgatccatccattagctgactgtgaggatccacttctgtgtttgctaggcccctgcatagtctcacaagagacagctacatctgggtcctttcgataaaatcttgctagtgtatgcaatggtgtcagtgtttggatgctgattatggggtggatccctggatatggcagtctctacatggtccatcctttcatctcagctccaaactttgtctctgtaactccttccatgggtgttttgttcccaattctaaggaggggcatagtgtccaacttcagtcttcattcttcttgagtttcatgtgtttagcaaattgtatcttatatcttgggaatcctaggtttggggctaatatccacttatcagtgagtacatattgtgtgagttcctttgtgaatgtgttacctcactcaggatgatgccctccaggtccatccatttggctagaaatttcataaattcattctttttaatagctgagtagtactccattgtgtagatgtaccacattttctgtatccattcctctcttgaggggcatctgggttttttccagcttctggctattataaataacgctgctatgaacatagtggagcatgtgtccttcttaccagttggggcatcttctggatatatgcccaggagaggtattgctggatcctccggtagtactatgtccaactttctgaggaaccgccagactgatttccagagtggttgtacaagcctgcaatcccaccaacaatggaggagtgttcctctttctccacatccacgccagcatctgctgtcacctgaatttttgatcttagccattctgactggtgtgaggtggaatctcagggatgttttgatttgcatttccctgatgattaaggatgttgaacattttttcaggtgcttctctgccattcggtattcctcaggtgagaattctttgttcagttctgagccccatttttaatggggttattcgattttctgaagtccaccttcttgagttctttatatatgttggatattagtcccctatctgatttaggataggtaaagatcctttcccaatctgttcgtggtctttttgtcttattgacaaaattgacaaaaaaaaaaaattgtcttattttgtcttttgccttgcagaaactttggagtttcattaggtcccatttgtcaattctcgatcttacagcacaagccattgctgttctgttcaggaatttttcccctgtgcccatatcttcaaggcttttccccactttctcctctataagtttcagtgtctctggttttatgtgaagttccttgatccacttagatttgaccttagtacaaggagataagtatggatcgattcgcattcttctacatgataacaaccagttgtgccagcaccaattgttgaaaatgctgtctttcttccactggatggttttagctcccttgtcgaagatcaagtgaccataggtgtgtgggttcatttctgggtcttcaattctattccattggtctacttgtctgtctctataccagtaccatgcagtttttatcacaattgctctgtagtaaagctttaggtcaggaatggtgattccaccagaggttcttttatccttgagaagactttttgctatcctaggttttttgttattccagatgaatttgcaaattgttccttctaattcgttgaagaattgagttggaattttgatggggattgcattgaatctatagattgcttttggcaagatagccatttttacaatgtttatcctgccaatccatgagcatgggagatctttccatcttctgagatcttctttaatttctttcttcagagatttgaagtttttattatacagatctttcacctccttagttagagtcatgccaagatattttatattatttgtgactattgagaagggtgttgtttccctaatttctttctcagcctgtttattctttgtatagagaaaggccattgacttgtttgagtttattttatatccagctacttcaccgaagctgtttatcaggtttaggagttctctggtagaatttatagggtcacttatatatactatcatatcatctgcaaaaagtgatatttttccttcctcttttccaatttgtatctccttgatctccttttgttgtcgaattgctctggctaatacttcaagtactatgttgaaaaggtagggagaaagtgggaagccttgtctagtccctgattttagtgggattgcttccagcttctctctatttactttgatgttggctactggtttgctgtagattgcttttatcatgtttaggtatgggccttgaattcctgatctttccaaaacttttatcatgaatgggtgttgaatcttgtcaaatgctttttctgcatctaacgagatgatcatgtggtttttgtctttgagtttgtttatataatggattacattgatggattttcgtatattaaaccatccctgcattcctggaataaaacctacttggtcaggatggatgattgctttaatgtgttcttggatttggttagcaagaattttattgaggatttttgcatcgatattcataagagaaattggtctgaagttctctatctttgttgggtctctctgtggtttaggtatcagagtaatagtggcttcataaaatgagttgggtagagtaccttctacttctattttgtgaaatagtttgtgcagaactggaattagatcttctttgaaggtctgatagaactctgcactaaacctgtctggtcctgggcttttttggctgggagactattaataactgcttctatttctttaggtgatatgggactgtttagatggtcaacttgatcctgactcaactttggtacctggtatctgtccagaaatttttccatttcgtccaggttttccagttttgttgagtataaccttttgtagaaggatctgatggtgttttggatttcttcaggatctgttgttatgtctcccttttcatttctgattttgttaattaggattttgtccctgtgccctttagtgagtctagctaagggtttatctatcttgttgattttctcaaagaaccaactcctcgtttggttaattctttgaatagttcttcttgtttccacttggttgatttcacccctgagtttgattatttcctgccgtctactcctcttggatgaatttgcttcctttttttctagagcttttagatgtgttgtcaacctgctagtatgtgctctctcccgtttcttcttggaggcactcagagctatgagtttccctcttagaaatgctttcattgtgtcccaaaggtttgggtacgttgtggcttcattttcattaaactctaaaaagcctttaatttctttctttattccttccttgaccaaggtatcattgagaagagtgttgttcagtttccacgtgaatgttggctttctattatttatgttgttattgaagatcagtcttaggccatggtggtctgataggatacatgggacaatttcaatatttttgtatctgttgaggcctgttttgcgacgaattatatggtcaattttggagaaggtcccgtgaggtgctgagaagaaggtatatccttttgttttaggataaaatgttctgtagatatctgtcaggtccatttgtttcataacttctgttagtttcactgtgtccctgtttagtttctgtttccacgatctgtccattggtgaaagtggtgtgttgaagtctcccactattattgtgtgaggtgcaatgtgtgctttgagctttactaaagtgtctttaatgaatgtggctgcccttgcatttggagcgtagatattcagaattgagagttcctcttggaggattttacctttgatgagtatgaagtgtccctccttgtcttttttgataactttgggttggaagtcgattttatccaatattagaatggctactccagcttgtttcttcagaccatttgcttggaaaattgttttccagcctttcactctgaggtagtgtctgtctttttctctgagatgggtttcctgtaagcagcagaatgttgggtcctgtttgtgtagccagtctgttagtctatgtctttttattggggaattgagtccattgatattaagagatattaaggaaaagtaatcgttgcttccttctatttttgttgttagagttgggattctgttcttgtggctgtcttctttttggtttgttgaaggattactttcttgcttgttctagggcgtgatttccgtccttgtattgcttcttttctgttattatcctttgaagggctggattcgtggaaagatattgtgtgaatttggatttgtcctggaatactttggtttctccatctatggtaattgagagtttggctgggtatattagcctgggctggcatttgtgttctcttagtgtctgtataacatctgtccaggctcctctggctttcatagtctctggtgaaaagtctggtgtaattctgataggccttcctttatatgttacttgacctttctcccttactgcttttaatattctatctttatttagtgcatttgttgttctgattattatgtgtcgggaggaatttcttttctggtccagtctatttggagttctgtaggcttcttgtatgatcatgggcatctctttctctatgtttgggaagctttcttctattattttgttgaagatattagctgaccctttaagttgaaaatcttcattctcgtcaattcctattatccgtaggtttggtcttctcattgtgtcctggatttcctggatgttttgagttaggatccttttgcattttgtattttctttgactgttgtgtcgatgttctctatggaatcttctgcacctgagattctctcttccatttcttgtattctgttgctgatgctcgcatctatggttccagatctctttcctagggtttctatctccagcgttgcctcgctttgggttttctttactgtgtctacttccctttttagttctagtatggttttgttcatttccattacctgtttggatgtgttttcctgtttttctttaaggacttctacctgtttggctgtgtttttctgcttttctttaaggacctgtaactctttagcagtgctctcctgtaattctttaagtgacttatgaaagtccttcttgatgtcctctatcatcatcatgagaaatgtttttaaatctgggtctagattttcggttgtgttggggtgcccaggactaggtggggtgggagtgctgcgttctgatgatggtgagtggtcttgatttctgttagtaggattcttacgtttgccttttgccatctggtaatctctgaagctagctgttgtagctgtctctgttaagagcttgttcttcaggtgactctgttagcctctataagcagacctgggagggtagcactctccttagtttcagtgggtagagtattctctgcaggaaagctctcttcttgcagggaaggtacccagatatctggtgtttgaactggactcctggcagaagttgtgttccactcactagaggtcttaggatcccttgtggaatcctgtgtgggcccttgcgggtgtcaggcgactctgctggcaaggtagcccggggctcgagtggagcggaaggggcttgtgccccaggtcaggcccgggtagtctgcttccctatgtaccgcagtctcaggttccgcgcgattggattggggccggcgctgtgttccactcaccagaggtcttagaatcccatggggaatcctgtgtgggcccttgcgggtgtcaggcgactccgctcacatttatttttctgattaaatgttactttgttcctctttgtgggccttgtcattaaaaaaaaaaaaaaaaccaagtgaatattcttcaaggtgtaagttttataacatggtgtttattaactagtacaatccacactaaaagtctggcaagtctccaataatttttaagagcataaagaaatatcaaaaccagatgtttgggagccattgtgggattcaccagcgagtgctaaatacttttgcaagccacagtgataaagcagtctgtccattcttcttggcagaaagttacttttcagtttcctttctgcagctcagcagagcagcagctatccaccaaaggctgaaatctttgaagtctgacaggcatttgtcattaagagcgagcaagtaaaataaattgcatttgtgacgggtatcttatttctttaatgtcgacacaactcacttagtggagagataggcttacacaactcacttagcaaagagataggctttatagcttcttttgttatattagcacacgtccatcatattagcaggctgttggcaattagcctaccatggaggcatacatatacatgctttggaacataaaagctaataggatcttccttctcctcccttccctgaggaagtatccatgctgctggagagaaactgctttttccactggtctccacatctgcaaaggttgtcatgacagactctattttaatggttccaggaacctagcttgacagagaggtagatgacgaagcaaatgtgtctctaaaatagaggttgtcaaacttttcctgtgcagggccagatggtaagtactgtaggctttgcaagccatatgctctctgtccctatcactgagctgtgtcttgaggcatgaagacagacataagtgaaacataaatgaagggatgtggcagtggttcagtaaaactttattcataaaaacaatggctatatttgtctctcatagcgtagttggctaactcctcctttactgtgatatgaaaactctgcttgctgtcctgtagggtcatggttcttgagtatggctgcctggaattgggggccaggtaagcataaatgatgggaaaattatagttattaagccactccaatgtaccagtactcaagtacctgacccatacgatccctaagatgctgactgtatttccaaaggtaggcatttatatttctaatttacacacagagcacagggagctttgcccacagacccaaagctgactaaccatggtatctagatatggcaacctccttccagttcttctctaaatcagtgttctggttcaaacaccactgctgtagatatgcactgttcattttgcttcttgtttctttaaaacatatattcttttataaaacacgcctgctaagtaacagcttccacatgattttttttttcatgcatctttggttttagctgactcccctctcctatgcatccacatctccctgcttccccttgcccccgctctgtacctttttcatccccatatcccccattccactttgttctgttatcttgtccacacctcccatttttccatggacctgttctagtttcctagcttttgtccacatgtctacacacaatgaactgtcagaagctgggggtcacaaagaaaagagagtgggttgtatgatggtatctgtctatctgatcctggattgttttggttgatatgctggcttctagtttcacccagttccctgcaaatctcccagcttcatgtttgttcacgactggacagaactccgttgtatatctctgcctccctttcatcatccattcgtcaactggtagacttgtaggctagtttgatttccttgttattgtgaaaagatcagatagaaatatgggtgtgttccaaattatttctgttataggatggggagtatcttctttttttattttttttaaatagacaattatttgtatgctaatctgatatacatactcaatgtgtaatgagcatattatggagattagtgttttcaactcttcaaacatttgtcattgctctttgttgggaacttttcattcttcctctatagttcttgaaactaccacaaatttcatagtcacccccacccagcagatttctttcacattggaccaaagtagtgttacctatagaatattaaatgattcactatagcaaaacttgtctaattggcctgattcattcaccttcatcatggtgaactgtctccaagatcactttaatataaagaaaactaaagagtccagattatggtgacctaacaattgtgcccagggttgtgatttacaatccatgaggatctgcatgagtaacttttttgaactgcttttgaggggtattgtttcgagcaatcaaatatactcctaaccatcactatcctcatatttgactagctcttcacagtattagtgtgacttctgtttttcctacattactcctagaaggcagcatttataagtttaccatgtgacagattcgtgcagacagctcttctacttttcccacactgctatagagaccagtgatcttctcacactgtgtgtgggaaattgaggctatgaccctgtgctcaggattatccagagcagatgtgatggagtttggatttaagagtaacgctaaagccacctagagtgtattagattttcagatgaatgaagccagagactgcatctgactctaccttttacgctctggtacactcacagtatcctgatgctaataacccttgtcagttaaagaaacagatcctgtaatacaggaatgatggagatggtttattctggagctaaatatgagggaccagggcctggtacacagggttaggtcttttcccaaatactatgtttcaatgagggatccatttcataaactctttatagcagccaagtttaaatatgtatgaaataaaacacttttcactatattgtcaggtatgtcaggtaggcagttacagcaaattagggggaactcttctattggcctcggatgctgtctgacagcaatcgaaccctttgattggtggatcgagaggtctgttcatacattcccaaggcttttccctgtagtcacaaaagatgttaggtcacgtacagaggagagcagaacgtggctactaaatggggtaaaagatcccttcaggatactttggctctggatttataacattccaacctcttacacatcattgaagttctaattagtcgatcagccttggcagacacagcttctgtccaggaattcccattcatcccctgaatggtgttttctgaatgagaaataaatgagaagtgtgaaataaatgagaaaatttcagcatgcgtccaagtgaaagtgacaaaatactgaattatctggtagagtatatctagatttaccaaactactattgatacttggggaattgtaatatattcatttcagttgtaatatagaaaatgcccagaacatttaaattggttaatatgtctttactcattcattctgtttccctctccctccctttaccccgttggtaggatatttgatcataatgttacctctctctctctctctctctctctctctctctctctccctctctctctctctctgtgtgtgtgtgtgtgtgtgtgtgtgtgtgtgtgtgtgtgtgtgtttgtgtgtgtgtaaagataactttcaggagtccattatctcctactgcattgtgggtcctgagcaccaaaatgtcctttggcttgaagacaggcaccttgactcaccgagccatctcacctgcctttgagttgcttgtcttaaagatggggacttgtgatgcaaggaggagaatttttagctttagtttttgcttctcctctcaaaccttcccctgatagtttaaggattccatgcttttcacaaggcgtcccctgtaacccctcatacccggcatccccacctttcctctgtgcatgtgaactgacttactggagagtactgcatgtttctgcggaagaatccagactcagcaccgtaagaccaagctgtgggtgacttccaagaaaagaacaaggagatggtcctctggagtgaagggcctctcaagacctttgcaccctgtgttgtgtgacactgttcctagagagacatgataagacatctatctgctcatctcagatagggaaccattacagaccaaagtaaggagaccaccaaagtctgacctagtagaccaatgagttgtattggggttatttacaggaatatgggtaagaggttctttacaaaaaattattcaaagatgtctgcatcagtaaagcctaccccagcatgagtaacagctcatggaagctggaagcctggaaggcactgtactgtgcaacctgcaggaagcttagcaggttggaaggtgtactttccaggtggttcagctggtctgacacttgtccagatagctctgctggtttctgcttcttccaggctgcttatcaaccttgagcctcttctcagccagtccatttatctgagactgtctctcatcaaacctcaatacttaatatcctcttgggaagagaccgggtctagtcaatttgctcaatttctggaacttcctgatgctattttgagttacttcctgagcttaacaggcttctctgtaggatggcatgtttcacctccccttacaacatcctgttgtgtcaccccctgtaaacattttgtcctaagatatcctgctgtttcactgcccttttaacatcccatgtcttgatgagcctccctccaagatagaaggcattaacctgtgaaaaaactgctatacactatacagcaccttggaccactgagatagatttaaaaccctgaagtcttgaataaacctgttgcttctcaccgatttctttcttgtgatgtagtacttttattacttcattgagaacttcactcttatatacaatgcttctttaacttagccaccccctaattcttcctggatccattcatcccagtctatctcctctctctctctctctctctctctctctctctctctctctctctcatgtgtttaataaccaactgaatccaatttgtgggggcatttactatgggaccacacccttaaagaaaactgaatctctgccacttgcttccccaagccatcaactgtcaatagatcctcagctgatagagggggtggggaaagagagacagagacagagacagagacagacggacagacggacggacagacagacagacagaagattgcttataggtccctccccctctccatgctaaaatgatagactggcttgatcttacacaggctttgtgcaggcaaccacagctgctgcaagtcctcgaatgcagagttcctgttgtgcccagatgctgttttgttcaccctggccatccctgacctctgactcttaccacctcttcttccacaattgtccttgaacgtggagaagaatatgatactccacagacttttattctctgcactctgactagttaagagttccgtattaaccaccatctgctactcaaagaaacgtctctgttgatgtctgagagctacattgttctgtgaggtctcccaccaaacttctgtctcctgggttctcaggacagaaataaataatacaaacatcagattccaaacaccaagttatagatgggtttttggatttttttccctatctttctgtttttaacttatatttttctactttttccattttaagtgaaaaatcaccaaagaaaagttttaaattttccataaataggaaaaaagaaagtagttgatagagttcttccatggtggtcagcaattcttaagtataattcacaaacatcccccgaggggcagtaatctatttatggaggcaaagcaggagcccatgggcatataggaacaagctaatgtgccccacatccagaaggggaaggggaagagaggcggcaacaatatttttagaagtgtatagaaacagaaataggctgagaagcaaatgccttgacaagcacatgggaatgagctacaagtgtgcctgggaaacaaatgggccatttaggggtgaggtaaggtgtgtggggcaggctaacaaagcagacacctagacccctggtaagaggaagacagacattgccttcagacaggaatgaaaagggcagtactcaattctcgggttggatggggcgggatgcagagaaagtagttctctcctgcccatcttctctttctaggatattctataaaggttctccggcaatattcttttaaagaatatttgtatttaagtaattttcataaaatatatttctttcaccaaccaaagtttatttgcttattttaaatttgtaaaaaaatataatgctgtctgcttttctgtctaccacagtctttaaaaccattgccagtacaatactacttgaaaaaaattatgcacttttttatgaaatttaaacatactagctagatagtaataagctatttttaaagacttatgaaataattgtagaaaatgctgcaaaattatttttagtgttgaaattgtgtagaatatacaatacagagagtttttttaatcttcaatttaatttaatattttttacttactcactttatattccactcactgcccctgtcctggtcaccccctctcacaatccttctactgtgagtgggtgggagccccactaggtatccccccatcatggcacttcaagtttcttcaaggctaggcacttctcccactgaggccagacaaggcagccagctataagaacatatcccacatgggggcaacagcttttgggatagcccctgctccagttgttggggacccacctgaaaaccaagctatacatctgctacatgtgagcaggcaggcctagatccagcctgtgtatgttctttgattggtgattcatactctaagaaccccaagggtccaggttagttgaccctgttggtcttcctgaggaattcctatccccttcagggcttcaatccttcctcctattctgacataagagttcccaagctccatccactgtttggctatgggtgtctgcatttgtctgagtcagctgctgggtagagcctttcaggacaacatgcccctgttggtgtagttcaggagtctaatgtagatggatgagaggtgataggagggtggagatccccctgggatagcaggatgctcagggcccataagatatactttgatcataagcattaaaaatgaaaaacaaaacaaatgaaaaagataaaaaccatgcctaaacaagacgaaacaacacacacatcaacaaaccttagcatttgttatgtttgttttgggcaaccacccctggcatggggcctaccctggagtatagtaggttaatatacccagtagcacttccttggaaaaaaagctgattgaattttcccctttgccaatgggtaccaactgcaaatagcatcttggttgggtgagtcaccctgtgtctacttgtcccctcatgttgggtctccactgagcttgaacttgtgcagttgtgtatgcttccagtctgtgtgtccatatgtgcttcagtgctctttaggctcatattcaggatagagccaggttttctgctttcctgctcactgtcccttggtggcactgggctttctctccaggatagcaaagaccatcagtgatctttgttactatgtcttcaccctcccatggcacacagaaaaattaagctgcttcctcaaacccctccatatttcttctttcacaatattcctgctctagatcctcaaagccattttcttcagtcaaatcaaccatttatccctcctttctaaagaacccttgcgcacttgttcattcactatttagcataaatcatgttgactcttatatttatcttcccaccaaacttgaaggcagagagtacaactaggtactagtgttcctaggatcctaacacaacacaaaggctttatggcctccacaccccctacagcttaggggaagatgactggtgaagacactggtagagaagggaaatttacaagttggagccaaagggaaataaaatgtcagatggtggcttgttaactcgatggctgttagggccaatatagatttaattctgttctgttacattttagattgggaatgctatggaagaggtggctcactattctataccacaggctcattcattcattcattcattcattcattcattcattcattcctgtattcattcatgcatgtgttcctttacccaggcactattataatatatacactgtaaaatgtactccccgtgtaaaatacttagagagtacactatgtaaaataacaagaaagtatacactttctaaaatgctaagaagataaacagtaagtgtgtaagagaaagcaaggcatagttcctcccttctgagaatttaccaactacagggccaacaaaccaagctataaagaagatgtagattctgtaggttctgacgccagtaaagcacctgtttgtattggcttttcctcccactggaagcacccataagcactaaaaagatacaagggacatctgtctgtgggttctcaggcagccaagatgaaagaacccagaaattgagcagagaagaaaagccagcgagataactcagacactttgcgcaggtttctcacgcaagcctggttccttaaatagcatgggggtagagagcctgtgaagtttaccaggaagtgtctagaaaacaaaaactgagcccaaaattcaattgacttatggaatagggaaagaaaaggtagaaattcagggccactgagagaacgggatgcttcagggaggagtacagcaatgaggggcttcgcctctcaacgtgttcactaattaacaaacagaaacagagaaagtgaacccggaacctaaagctgggtaagcagagatcaacagagacacagagttctctacagggaggacctactccataaatgctctggcttgcagctagctcattccaaggacaacacccaagaagggaggactctgaaatagaaggactcttttttactaaaggcttctgaagaaatccaacctctgaacacttaatctggactagattcaaggcactgccctcattttagcacctttatagatgctgacgactcatctgaaaccttcctaatcttctttataaagtgtttatttaatcaaaattaacaaacataccaagaagcagaaccaagcaacagataatagaggcagaggcataaatgatccagacatcaaagaggtcagatatggactctgaaatagccatgattagcgtatctgagacaacagatttctgacttctcaaggaactggcatttgaatccatctgtgaagaatccttcagagctcagcctagcaaatacataacaaagagttcagatgcagctcattccaggcaaagagcaagtctgaaggacaagagcacaggaagaaatggtgacacacactgacttggggtaaggaggagagggtgtggagttgaggctgaccttccaaaaggaaatggccaattgacctccatttccccagaaaatcagttatggtgattaagcctaccagtggtcaggaccatatcaagttcaggaaagagataaagagaataaaagaacacttaatttcatttatctgttttaggatttcttcagtaaatcagacccatttctggaaattttcagaatgaacgatgacgcgactcaacagcttgtgcatcgaacagaggtaagatgtgtgcgctctgcctctgagaccagtaatgcccttgtaaagaatttttgtacatgatttccaatttttaaaagctaaaatatagttataccatttcccccttccctgtcctccctccaaccctttccatgtgccccttggctctctcttaaatttgtggctctttttctgtagctcttgtgtgtgcacacgtgtgtgtgtgtgcatgcatgcatgttaccttaaatatagaactacagtctgcttaatccataaaatgttgcttgtacaatttcagaactgacacttggtattggaaagtcaattgccggactcttcttcaggaaagactattcctccagctctcactgttatttgttgcctatagttctttgtctagggttggccatgggacatcctatttctttttttttttcccaatttttaattaggtattttcttcatttatatttcaaatgctatcccgaaagtcccacataccaccacccccccactcccctacccacccactcccacttcttggccctgttgttcccttgtactggcatcctagttcttgttagcttactgcttgtagacagacagacctggggcctcctctctccttgagatgatcctccacatttttggtttgggtgtttactctgattttctaacgttggagaaaattctcctctctagatgcaacgtcctatagttgactttcaacacagccaagcagcaatgcatttatcataaattaggaacactagagctggcaagtcactgggcctaggtgagctcctcacccattctccctccaaccggatccctgttcactgcttttattatccctgtgcccaaatactcggcagaagcaatggaaaggatgaaggctttgcttttgttctcaaggaattctgcccacatgggagaggaagcagaggggctcaattacatctgaaggattaggaggcaggaccctgccttgtgggcaatttctcccaactaggcagtattttccaaagtttccacaagctctcaaaagatgataccaactaggaacaaagtattcaaatatattcgtctatgggagaaatttcagagctattacagattttaatccttatccttctctaccctaaatgcctggtacaattctcttatatgcacaggcaatgcttatgatggttaatatcccattgtcacttgatgggatttagaatcacctaaagaaaaaannnnnnnnnnnnnnnnnnnnnnnnnnnnnnnnnnnnnnnnnnnnnnnnnnnnnnnnnnnnnnnnnnnnnnnnnnnnnnnnnnnnnntccccctccctccctccctctgctattgatttccccaaacctttcactccttaacattgtcctaaataagcacagaatatattaaccaattctccttctcacagaaatttggtcatgcccagggtattaggagacaagacaaactcacgaaggaacattgtttctgtattttaatacattaaaataaatctaataatgaatctgtgatcacatcaataatccataattatagtaaggaagaagtgggaatcatttatgaaataattactctatttggagacagaatatttttttccaaaaccaaaatccacaaagacttctacctaaaaacttcataaattaacacagcagatttcatttaatagtttaattttatttggatgccctcttaagtttcattcagtagataacataaaagatcttcaaaaatgtctgcttataggactaggtggcgctcagaatttgtgcttgcaagaagtccccagtaacatagcacctactggtccatgaatcacactctggtagcccctactctaaagtacatgcctggtacacaggaaccacttatacaccctgaagcgagccggatcattcaaaacaaaacaaaggcaggaaaaatctcatggactcttaggcaatatttagccaagttcatgattaataagctgattttaaaaatacattttcgctatattattggttaactttataatctgaagaattaccaggttatatctttccaaatattctaattgagatagtgtttggctaatgtaaagttgagtattcttcatctagaaaattctcagactctccatttgatataactcatagacttccaaagctctcaacacacactcacacacaaacacacacacaaacacacacacaaacacacacaaacacacacaaacacacacacataaacacacacacacacatatcttagccctctttcactttcactgggtgcccagcaatctcacctcctactttgatgttttcttgtgtgcttgtgtgagctgttgtgtttaattaggactgctcacatgagcgtgcttgtgaggttgttcactggagcatggacaactgaccaggatccacaccacaagcctaatggactcccctgaccccagcaatcactaactgctcacagcccctcagctagaggtggtgatgttttcagcagtacctttccatccatcccagatacctttcctctgctgactccaagggaaaggaatccatatggtaagactaatggtccttcaggaccggggaatcctttatcagtggccagaggcagccttgcctcaaccccaggcctttagatatagaagaggttatcttctatatccacatgctgggcaatgtcactgtccttattcatgaaacaatatcgaggccagagaacacagtggttctgcccataatgacctacttcagggccactcttaaaatacccactgtcctcaagtttgcatcaagccacctgtcccagatgcgtgtccttttcataaacagcacagtggcttctcgagtcattttcctgttggagtatgaaaatgtcaagcctttcctcttcaaatcactattcatctctttctcttcccaggttgtgatgaataacttaagcccagcctggaagtcattcaaagtatcggtaaactctctatgcagtggagatccagaccgcaggctgaaggttagatcctatctgagagatgtgaatttgaaaatgtattgcactgcacttgcttcttctctcccatgaaccagggcatgcagaattttctgtgccactctcccaaacctctcaccttttagcatcttaatggaagaaagtgaggctgtttcttcttccagagctatcaacacacatacaatagccctaaaataaatcctaatgtattatgtcaaaagacagtgcctggggtgtttcagaaacaaaatgtggcaataacttcagagtataattgaaagtttctggaaagaaaatatttctgcatcaagtatctattgttatataatgtattactctacacacacacacacacacacacacacacacacacacacacacacacgtgtggtagtttgaggtagtaaatgtgtttagcttataactctgtgcatgggcaaacagggtggttcatagacaatctaggtgattcttaggtattcttggtctctgtgaggcactcatggtctgctgcccatgaatgggttgacttctaggggttggtaggcagtgcatgtgtgtgtgtgggggggggggtgtcttagtccttgtcatcagtccttgctggtacagtccagtattctcaaactcctgacatttccacagtgcctaaaagacttgttaaaataggaatggctgagcttcacctgcaaccccaagtttcagattcaggggatacagaataggcataagaatctgcatttttgtcaggcttcccaatgggagtcatgctcctgttccagtgaccacgctttttgagattaagcgtcggcagctttcactagtttccactctacccttctctgctcctctttactggcttcctccctgccaccctctctctgtgcagtgctcagacccaggctgtacaccctgcacatgcaggagaaatgacagtcagctctctgctttggaggctgtccttattcttctgcctttccttgagcacactgtttgcttctgagtctcttcaatctcctcccgcttgcagaacgccttcctggtggcgctaacatctatggggtgcttcctagccttatttaccaatactttcttagcccttgtagtgggcagtgagtgtgggcgcatgcgtctgagtatatgcatatgtgtattgttctttgggtgatgtcaaccttcaaaaaacaaaacaaggtctctctggggaccaaccccaaatcctcaaagcgctttgcagaatgcgctgtctcatcagttcagaagcttcctgcagatgtctctgtcttcccggctgacgctgcttctccacacagtcagcatctgttccctgtgcatccagacatctaccacatccaggccctgcctggagttcctgcagtaatggcttctggccttaacctgtgctaggaaagctgctctaatagggaggttggcaggctaggcctagccccattgtgaagaggcttccctacctcccactgctgagctggccctgcagtggcactcagccgctcactgtaacgttggctcttctgaaaggtgggatgggttcttatgcggccttttatttatattcgttggttcttttgcttcgagagcagccatgaaattctagtatggcttctccaaatactgcagtgccaagctgccagaccagagctctaatcatatgggtgtcatcttcccaaccaacaaaattgaaaattggaatgtcctaaaccatctatcaggctagattttaaatcctaacttgataatgaaggctttcgttccaaagcatcctttcagtgtctttcttagtgacgcagcatctacgtgaacatcaacgttaagtagctagcagcttctccatttgtttgttttcctctccatgataaaagtcaaaacagtgactggatgacacttttgaaattgatttatgtattcaatatgaaagtatttaagtacacaggcagtttaaagagtgctgagaccttctcccctccccctcccccacccccataccatcccacagcttcggaaatcattactcatggccagcttcctgtcatcacgccctgatgttccctgtcactcacaccgctgggccatcttgaaccgaggtgagcaggcagaaggcccacaatgctctcaggtgcccctcccccaaatttctctgagtccttttaaaagaatagatgtcttgaatcagatcaaatacttatgtttttgctacatcataagatgatgacgttctaaaggcctgtggtaagctactatagaaagccataaaggggcagggtagagcctgaggccaagcaatagtatgccatggtgttatttagcaaccacatttcctgatgtgaaaatactccaggatgtaccaccaaaggatgaaggaccttccagtaaacacaactagaaaactctctcatgcccaagactgttacctggaagcatttaatgccattagataccttgccacctgcgcatatctgcctctctgctagtgatttgctaacctctgaaacagttggattttctgttctatgtgtgtgtgtgtgtgtgtgtgtgtgtgtgtgtgtgtgtgtgtgtgtgtgtgcgtgtgtgctgtatgtgctcacatgtgtcaggtgcacacacccaaatagatactgaggaggatgtggggtatccttctctatcaccttgcacgttggtcccctgagacaaaatctctcactaaatctggagctaggctgagagccagcaagttccacctgtcctttctctgcctcacccacccatacacagcgctgggcctgcaggcacagcgcttgagaccatacatgagggccagggatttgaactcatgtctgttcaacaagcactcttacccactgagacatctcataggtcccggttatcttggttttacagtaggctttaaaccatgcccagggtgaaaatgaggctcttttaatgagttagttgttgctccctctttgtatgtttagtcttgttttgtgtgaggtttctttaaaggaaaaaaaaggcagactagtgtgtcctgaagtgtttttctacattctgtttcctataaatgggtcactggggccaagttctgattttgagcaacaatgcccctggtgttattaagaattcatgggattttttatgtgaatgtttcagtctatttccacgattattaatcttttcacacactctatcattatgtctttgagcaaggagaactcctttaagttggcccttgaattcttcaagctcaaacttcataagtgggtacttaaaggtttccttgcttcctagaccaaagctttgagatcatcaatttaaaagttctataatttctttctccctaggacataactttatgtggatgtcaagttgttggctatctcttgaactcattcctcctgtatttatttattagaagatgaatcaccatgatgagcatgtttttgacttgagcaaaatgcttcattttctgtcattgaaacatttaacaagaaaaatgtctacatgtaagatattttatgaggtctgaaaccctgaatcacttaatgttccattaaaggaaaataatctccaaaaaacccaattcaatgaaatgtgatagtcatcagttcttttgatttgatcaacacactgatccgaaacaagtcatgaattttagagacagtgtgcttctcagaagagagtcttccagatttgggggggtggtcttagagaaggagagggttggggagcaccattggcaagcatttattgacatcataatgtgcttagtactgagaggagaggccacatcagagcaggcttgacaaataccacctgctcacactgagaactttgaaccacctatactaaagggacagatcctctcttttttcaatatattagttacacagatgatttggagactcccctctataaagtgtatgcgaattccttcaagtaagtgttgatgaaagctagctgctttgagagtggcaagcaaggggcccagactgttattctaaggtgggcacagagaaaacatagtcaggtaatcagcagtaacagaaagcagggagcagtgtcctcttaaaactaaaattaaagagaagtcagacccatgagagtgagaaaggaagcccaaatacccatcaaaagtgaccatcaaacaataatgttgcccacacctgttttgttcatctgtcacctcctcctttttggctgccacgctgattgacttaataagacagccacagttacaagttgccatctgacactcccaaagttgggacttgtgaacgatccctaaagtgttctcttaagtcaaaatcccagctcattaaggctggaatcttcctttttaaactcataaatcgtactagacacaaccatttgcttagcctgcattaagagacaccatctccttactgccaacttgtttcaggttccgcccttcagcagttcattatttttctgccatcttaacacaaagctaagtgcacatgtctctgtgtgttctttccactctataaaatcatttgcatttgttctttcactagtccaactatctgcatcttccccttctaactgtggccagcctgtcttgagttgaaattgtattttctccctaagttccactattcttccttggactctctgagtcaaaatgatatgcaattgcctaatgagttgagttgggactgccctccagtatgttcttagtttgctttggacctttgctttttatcccgtccctgaaaacccattacctttaacctatctccatcctgtaaatagtcttgcattacttattgttgatttcctctaataaatctgtattttactgcctgagaaggatgatactacattgcaatttaaatccctccaaagcttagtccttaatagtgacccccattcagttccataaaaccccaaatctatagcatggggattggtcaacattttctggggttttggtgcatgcaaaccacaggcaacttgacttgaagggaccattaatgtgatcagaattactggcaatggtaattaagagcctggcattattagacagtttaatgcaaccttacttctctttctattgctgtatagctatgaaggggatgtccatggtcttattatattttcttgaaatctgttcaaattcaagtgcttccctcatagccttggggactcagggctgttggtcttgtgcctgtcaatcattcactctgccaaaatgttcagaagtttacaggaggcttcaagtctcatccaagtctctcttgattcaattgtctgtgtctctggaattcttaactccacttgagtaaatggtgcccctgatccatgattctccctgagaatctgtaatcaataccacagtgtggaaagcagtgttcaataatgcaggaatcgggcaggcttgtgaactgatggggacatggcctcctcgttttaatatttcttccttttcattaatattgttctccttcacaaatgaggatcagagactctgctttgtagaaaataatctaagatttgcagcttaaataagcaaaatcttaccttaaaccagagcttcccgtgcctttttgtctctgctaaacaacagataatatgtactgagtgcgtgccaggctccaggaactatgctgggtaggcccttggcttaagttttctcactgaactctgcaattaccttagcttaaacaatccagcagggggctagagagatggctcagtggggaaagtgcttgctgtgtagacataagggcctgaattggggtccctagaatccaggtaaagggcaggcacaactgtatatatctataaccccagcactggaggatgacacagaagagaggatctctcagcccattggccagttagtctaggtgaaccagtactgagcttcaggctcagagagagaccttgtctcaaaactcaagtgagagagaaattcaagaagacactggtgtcttctgccaacatacacacgtgcacacatataaaagaaaatctaaaaggcaaacacatagtatagcaaagaacctccatgtatcaagtttatttcttgcttataaagcaagtacagataaaaaaattcaaaacaatgtctgtttcttcatgattcaagaacccaggttccctctgggtgtggtggcacaaacctttaatccaatgactgggaaggtagatctctgagtttgaagccaccctggtctacatagctagttctagactagccaagactacataaccagaccctggagagaactcttgggagtggtactcaggttcctcgtacctatggctcacaccctcatttacttccaggaaaacagaaaaagaaagctttgtgcctgaaaccagttactggaactcagtaacagctcagtcacacggagcagccaggcagactgaacaatatagtctagttagatgcctataaagaaaaagaaagagatttgtgtaactggttgtttgacttcccttagggtttcattgctgtgaagagacaccatagcctaggcaactcttataaagaacaacattgaattagggttggtttacaggttcagaggttcggtccattatcatcatggtgagaagcatgacagcatccaggcaagcatggtgctggagaaggagctgagaaatctacatcttattccaaagggaaccaggagaagactggcatccagacagccggggtgtggcatgtctccaaacccaccccctcagtgacatactttctccaacaaggtcacacctactccaacaaggctatacctcctaatagtgccactccttgggccaagcatatccaaactaccacattccactccctggtccccataggcttattctaactcatgagtctatgggggtcatacctagccatagcataatacagaatatatttagtccagcttccaaagtcccatagtctataacagtctcaacactgttcaaagttcaaagttcaaagtctcttctgagattcatccgatgacctaaatgtaatcccctaactttcatatggagaaatgttttttattgcccactgtgtagatgagaagtctggggctcagaagaagaaaatagtattctaacacctagatccacaacgtttttaagtggcatgaacaaaatcaagtcgatctgacttttgagctgaatttcacaacagtatgatacaataaaatgttgtgaaggggaagataggtaagctgtaggaagtgtgcatcagacccaaaggctccatagaacacttatgtcatgcagatgttccaagttcactcgtgttaattggaagaagatgactttacctaagcctgcaagttccgaggagcagttgactgaacagacacatctggccagaccagttacctcccagccatttcttctctttcagcaccttcctattttgcttgtcctgtgttaataacccattcctctttccccaaacatcatcctttcatccacggagcaggaaattgcccttcttcctgccccaggctcctgctgccaatgagagtcttctgctgcatattgtatttagtaattctaaaagggaaagggggatgatgtctcctacaaatgggctcagcagtgggtgctgcttacttcaataatgaagtgatgcttctatcactgagaatcagaggggtcagaggaggagagagggagaaggaaagacagagggaaagagagagagacagagagactaccttcccaaagcaagacctgttttgtctaggaatccagcaaattggatttacataaagcttaagctatggagctggtatttaatggtcataaagttttagtgaggaagacagatcatgtcttgtggtgagcaatgataatggttataccacaatgcaatcatacttaatgctgcagagctatgtgcttcaaaacaatttgatggcaaatgtagtatgataaatcttttaccacaataaataagtaatcttccagttaacttgagtgaacttgaagcatctacccagcatcagtgttctatggggcctttggctcctacccctacttcctacagcttacctattcttgctctgtcagtcacctagcagctccctaaagattccttcggacactggagttcttctgtttcataaatcctctgcccagtcattatgaatgaagagtacagtggaggcagcaccaataccccactcttcttctctccacaaatcatcccttctaacatctattgagtagacccacccaccccctgtctctgtgtgatatccctgaagctaatggaagccctcttcaggctgttgtattaagaaactacaaagggggaagatcagccccaggtactacttctatactaagataatgacacagaaatccaactattttattggcaaaattgcccagggctatggcatgtctttaactgtctgccaagaataacctgccaggacttgactggttcaaacagtggttttgaagaaatcacttcagttgtgaactaagagccctgagcgagcactagtcatgtctctggtgaggtctccagatgataagagatgagaggcctcttgtccttctgagtaccttgtctcccaattacagactgcatccactgttctgtttcctcatatttatcctacttacagccaattctacgcagaaaagcggtaggtgcccagtttgggggatgaaatcagaggaacgacgggaagctgaatgatgataagaaacactgttgtgatttgaatctaaaaagccctccatggactcttgtgtgggtggctcagttccccacgtgtagtgctaatttaaaggctctggcgtctttaggtgtggagttggggcttacctggtggaagcggatcactagcatttgaaggttccacccagctctggttccagagtttcccagtcaccaggtaaggagtctctcccatgcactcactccatcatttactaactctgcagtaccttctgcactgtgatccactgaagccctctgataccaggagccaaggcaagccttcctgctttcaagctgcttctgccagatgttttctcatagtgatgaggaaagtagctaatagagaaaggaagagagtggggattctgggaatcccttaatacagctgtcataggttgattctatttgtagtacaataggacaattctagttgtagtatggcaatctgttactggtaaggctgatgctgtgtgccggccactttcgtggctcattcttgagtttatttgttagttggtttgtttgcgtgctaatctaagcctttcatgttctcatctattgtactattttgttaacactgcaactgaaaacattgcctccaaagatttcaatgtttattactgcacagttggaagtgtttttaacctgaccttgttgataggaaggtcaggatggagtcggcttcctaggaggcatttgtcactgagtcaggtctgtggggtgtgcatacagctccactctcacaacttaagcattcactaacaatgtggtttgggggtgggggtgggggacatcacagtttatggctattctgtaaggttttctccagaaaaatattttcaatagaatctacaaacaaaacagaaagagagttatctctgaggaataacatcagccttgatgaagagagtccttgagactgggggaaggatcctcattccactgcttagcagagcaatcccagaggcctcctcgggagctggaggagatagtagaaatagctcctctcataagtgcagtgttcctgagatctcacatgcctgcaacatccttggtcttcaaagcagggccgaggaaggtcaaggctatgccaggtatgtgagcatgaaacagattccttaaactgaacattaaggaagaaaacaggaaagttctcactaacctcttaggaaattatttgcccccgagaattaccgtcttttgggatctcaaactctagaaaggaacaataaatgtttcctgactctcccaataaagagaggaaacagtgccgtgaccagccacacctggacctcatgcagctggagataaaagagtaagagaagagagatgcctcctcatgctgtctacagaggcttctcgtgtttgggattcccagcaagcaactggtctagactcgagcttcttcaatgaaaggagtccggctgtgtccaactacttgacaggatctggaagaattgactcagaataaggaaatatgtaattccagaggccataattctaatttataagaaattcttaaaatgttaataaattgactagaccaaaaaatatatatatattcctcacattccatatagagatgggccttcccttgtatctgaacgttagtaactagagcccagttgacccaacctcaagggctctctttataaaatctggtgttcttcctcagagataactctcctggtgccttatttgaaggttctgttaaaggtgcattccagagagaaatgcccagcataaccttagattgtggttcccctcctgctcagtaaaccacattcctacttagtacttatgctgtgcggggagcagctgcacgcctgccctgcagacctgactcggaagcaaatgtctctcagctctccagtcagctccatctctgaagatcttcctgccaacaaggtcagagtaaaaatctttcccactgtgaagaagtaaacattgaagtctttcaaggcaacttttccagacctctgatttggacaatgaatgacacttctcacaatataatgctgatacagtaagaaagcagtatttgcattggacttcaaagtgattatgtttactgtgttgtatccagctcattaattacagagaaaagcaaggagatgataaacctgagcattttccaggaattcagtttacacatctttccctcgaaacgtgactagagctaagatttcttttttctttaatcctgcctctttttaaatgattttttgataattccatatatgcatccttattactgtcacctcccacccacttatctctctcccacctcagccatcctccctcctccctcctccctccaagttcctttcccacagtctcttcttttggtctcttgattttagtcaggaccatttgtgtgacaataggtttagaatagtccgctggggcctcctgggctccttccttagtgagtacaacacctcccctagccatcaatagccagtagttcagcagacagtagtagagtccatgagggtccatgagcctctccccaatccccaattgtctgttgagaagcacagtcatgtacaggcccggtgcaggcaactatagctgctgtgagattgtatttgcaacagctgtgtcatgcccccatgacagccttttccagcctacctctctatcgtctgtcacttacattctttctgttccctcttctgtgttgctccctgactcttaatggctgtggtataaatgttgtttagagctactaactgctgcttagctatccattattctcagcaccttgagcagccatgagtctctctgccttcaccaccactcacaaagcacttctctgattaggacttagagtagcacttatctaagagtataacaaaaaaatatttaaagggagtttggggccatgtcaatttagctgaatatcaatagtaaactcacacactccccaaacccatacaaaagcctcctcggcactgagtttttaactgagaatagagtaccaaccatgaagtcctccttatggagcgagcctaaaatccagtgtaagagtgattggttatcaccaaactcactgtaccaccgttgtctctattacacatctcgtgtggcatgtcggcattgtggttcataaagatcacagctggataagaccactgattctgtttctttcctagcggcagggataatatctttaaatgttatgaaagccagccagtaggagaaaacttctaggtcagttacagctcaacttctctgtatttttcaactgaagtatgtggtgtcttcggcaatagagccttatcacttagttttggtgagcaaccaagtggaatggcaagagcctatattgtttggagcttctcttgagtctccctgaccagatactattccatacttgctactggaattttttaatattctgtggctcctaggagtaatattgtctaatagcgtagggaattactttctaactcccttttttaaacctgtgtttttaattggtttgcaaagtagcatgattctatatggtttttcatatacccttctcttggctagcactcactcccagcccccttgtctcccctgtgctcctaccctaccctgagtacccccaccccatcctgcttaaacctttctgctatcaaaattttttctttacttccatatcatctataaagaactaagatttctacatataaaatagattaatgtccttcaggacaatcaactataaatgttgcactcatctttgttattggacataaggtattacattgtacacacgtgtagctacatacacacctgcaaatagatcaacatgtatatttatagagtctgagtccttaattaaagtagtaaactttgaaatcaagctatatgttcttgtaaggaaataaattacccttggaaggacctgttaaacaaagtttcttcatggcgttgaaagaatgtgtagccacacccatgtgcttaagtctacattgtgattaatgttcttaacatattcaaataaccccttgagttcacacatctaaagccagatgtaaacctgacatcctcatctgttcttcaagcattttgtccctgtctctgcatggctagcaagttcttcacctctgtgtatcagttcaggagccagctactcagacacgatcacacatgtcattcataatccaatcactgccgcctcatcacctattcatctccttcaaagcaggtacggtcgtctgctaccgtcttgcgtacttacatgcatgcttacggtttgtctcctcgaccaaagtattagtggcacggtccaagggagagaaactgacttccttcatctaagcagtgcttagcctttttctactgtaatcttcataagtatattaatggatgaatgtgaggtggatgaatggatgtcaaagcctgtagtaaggttttactatttgtcctgaccttttaaaatctcccaggggaataaaatactccttaattttgtaatcttgtgtgtgtgtgtgtgtgtgtgtgtgtgtgtatgtgtgtgtgtgtgtgttgactctaatgttggacctgggacacttgctgtgacctatagcaagtctaaattcaacatgcaaacacttctcattgcgtctcaggggatatcccccactgaaatatgctattaccatattctttccaacgagtttcctcattaccagatgttatttcccaccaccagccccaggatacagggaggaaggaggcaaaggggaagcatgccttcaggactgagggcttacagagtgagtcccacaaagaagaaagttttcttgaccagaactgactctctgagctcagctttggaggatacagagactaaattctcctcagaaaagaagggaggatggaggctgctttgtggatttttccaaatgtcaggtccctttcgtttcagtgccgcatcttgtacttggctccctttgaacagtttctgaaatgacataaaccaagtctagagctaagaatgataaatcctggcttacccttaagccatgaggtgttcagtggaataaatcaggagagggggcagggtgggtgagacaaacaggattcaattaaaagtcttgaagagagtgagagccatcctggagaacctgggccttaaagcttttctacaacctactccttcctctctcacccctcccttctctctcccttagcagttaagcctgcacccagcatgcctgattgcactgacatttaaaacacattatggcagacatcccatggaagaataaaatcactaaatggacttgtcaggaggcattctgtccagctcatctcccctgcggaccagctggcctgattcattggctctcttacaacctcctcaactctgctacttccaatcacgaaatcaactcttgaaggcccatgatataccagagtacaacggactttcggatggttgaggtcagcatggaatcccaaacaatgctgccaatttccagcagcatcagagtcacctggagagcttgttaaaacaggaattcctgagtttctggcacagcagggattggagcccgagaatgtacatggctaataggttcccgggtgccactgatgctgctggccatccacatttagagaattaataataatggagaaaggagccactgccgtaatattatattgtcttcaagccttgcaattctttatatctgcatccattactgtttatcccccaaatcagcacttcgttccagtagctcacatgatatccttccaccagcaggcactgacacaagcatttgaacactaggaggaggctctgtagttttctgtcagctgggggctccagccttcccatgacccatattttggtctggacaattgcgtgtccagacatttactaacatcttacttgcacagtaagtaggtaggtaacttactgtgcaaagtaagatgtgcaataagcatctgctcggtcgttgaggctcccatccggacaagccagctgctcccagtgtaggctgagatcctggaactaaaagtgcacatttaatctcttgcactttgggggactttaagggtgaaaattcatttcaacccatcttgaattcggtccaattgaaaggtaaagacataactcaaaaacatggcaatcaaaatgtcactttggtgctgataatcctggtccctgatgcccaggtaggaaagtctcctaggagactttgggctctgatgaacaatagtgtcaggcactgcgatgcatatttgtggaatcctagcactttagagctggaagcaggatgatgaggtaatcaaaaccattcttgtctacataagaccttgccttgaagataacatcaagtgagagaagccatagctacttttaggataggaagacgagggctttagaaatgccagattcccactgtgtacatgggcatccagtagcctgagaagcataagtcaaccttggatatatattacaaccacctggcgagcataagaaaaacatgggttccctggcctccacctcagaacaactaagtaaaattctctgggaaaagatggcagaaattcttagatgtagccagagtaatctagcaaggtgaaggtccactgcttaagtgaatagactgggacattttgatccctttttctgatttattttcacagctgaggattgagcccagggcttcaagcatgcactcaggagatgagctcacaccatttttagctttggtagctagagtcccactgtgttgtagagagtgggatcaaaattagtcctgcttcagcctcttgagtagccaggacaacatgccaccatgttcccaccatgtctggcttttgtgttgggagccttttctgaaaaatcagcgaggaaagcaaccacctagactaatgcaccattgccccgaaagccttctaagactcttccagtcaatgagtcatcaaattctgctgccatgtaagtggcaaagtagctggcaagagcactgagggtttgcataggaagcttcaggggttttctgggacaataccatgtgtaggattctgtgtcccaaaggcctggggctttgtaatgaaaaggctggaggttatattattttaatgtgttgccagggactccaagaacagttaggagattacaaagttagtaagttaggtacagcctgtgtttcagcttaagaattttaggtttttatcccaggcaatgagaagcagcagttctgtgaggaaaggtgatgagatggtgtttgagctcttagctggaacttggagggagaaaggataaagttgagatgggcaatccagttcatggcaatggaagatgatcagaactcggccccaaattgtatgctggatatagggagaaggaaaggagaaactagaatgagtctctgattcttggttcactaacatgtgtggagaagggaccatactataatatgagacactggaagaacaggtttggggtgggaaaggtaagttttggttcatagttgctgagtttaaggtgtttctgagactttcagtagacagcccagaatttcccttacataagtgcaggaagccataaagtcctgaacaaaccaggataactgtttaacatggcaattggcttaatgaatttgactctcagaaaagagatctaagttggggcacacatgtaagactcagtaaacatgcatgtatatagtcatatatatgcatatatatatatatgactataagaaaacacatcaaaatgtatttctcagtggcaaaattgcaaaaaaatagtttctttttaattttctaccttcaaatgtgttacatttgcagtgaggaaaaggaaaacactcgtttaaaatccccacacgtttttaatatacatgccaatgtgttatatttacttagacctttttagttcctatttaaaaattcaaaattgaattgactatttttaaagtccccagtgggtttttctgatgatgagcaagtgtggcctatttttgtagagtgacattatgcaaagttttccagtttgccctaatctccacttaaattcagtgtctgtagaggcccaaagtaacttgccaataaagtgaccacttgatatggatgcaaacagcaaaggctgtcagcctccaaagctttgttagtttctaaaaatgagttcgtcttctaacacacttcagtcttattcattcccggtgatcaataatctagggagctggctcagccatcaagagtgcttgttgctcttgcagaggaccagagtgtggtcccaagcacccatgtccggtgtcccacacatgtgcatataaacacacacacatgtacgcatgcacacacacattcacgtacacacatggaataaagcttttcaatctgtttgagactataccacagcacttatttctgaagcttgtggtcattactgtcattgactattctttaagacaaatacgtcaggaatgataacataagtcttcagctgaagtgagagatggaaactaatgttcagtggctctgatatggaaagtcttggattctttagatgactgagggataggaaccttaaggcagcccaaccattttattatcccagcaacaaaaactgtgagatctagcaacgagaaatggcttgctatgtgccacgaggctcattagaagtcaaaacaagaccttaatatggatttatagatgaaatgtgctcttgctgtggagcagaaatgatttgggtactttcccttaatccataccacaagccttcaaggttagcatagaaagaagctggagcccagagaactgagtaagctcctttaaaaatcacagatctctcaaagtcagaacctgaagcccaggtctggttgagtcccaagttcattttacatttactaaagtgccccaagactctgtgatccttctcttcggacacactaccttcctaagggtgagagaacaggttaaacctctgtccttaagtgaaagggggaagtgtcacatttatttatcagctgtgctcagtgtttaaaggatgagggaagaggataaatgccaacaacctgactataatttaataggaaggtgaagggcccttaaaggcgaacaaccaggaaacaggaacctcgagggctgtcctaagcttgttctaaaagccaaggactctgtagatatgggggagacattatgtaaggaagggtagagaggagagggcaccttgaacattctttctttttcttctaagtctgagatcaaagaggaagaaacagttttcttcctatacctgtattgtactaactgtactgcgttccaagacctcccagggttttcccattttgcagatgcaaaacagaaagatagattcaattatttgtacaggatatcatgaatgattttcaaaaggtgggaggagactacaaggaaaggagctattaattaattgcatgattaattaattaattacatatctctactcttatgggactagtttgtgaattttatccaataggagaatttttatgatgtagaaaaattagcacaaacgaaagcactaataattaatattttcttccttttccataaccacattacacataccctaggctggccctcatgattcctgtctcctaccatctttgcataatctcatgcttttaaatgtggatgggacctgttgctttcagctatcaatagctgtggtgataatgatatgccatcctgtggttctgtcttattctatggcaaagatgaaggtatagctgggataccacatctgtccattttgatgtaataaaagagctgattatgggaagccctttcaaagagggttcagggagtcccagatgtcagagactataagcctccctgttgctggcttctagaaaaccaggtacaatgaaactaattctgcctacagtcccagagaggctaaaagtcaacactttcctagttaagcatctaggtgaagtcaggccaatccctccattctgccctgaacaagaccccagatgatgaaagcaatgagtggactctgagatacaaaattgtgagataacaaatgagtattcttttgatgcaagccgttatccaacactatagttaatgttacgtttacagttaatgttaaatggttgcttgttgcctttgattaaggaaggtcaagttcaaaataggaggttctacattctggcacagttgcctctaagttggtcattggcctcaagaacttacatattctaggcaagtgttccaccatggagtggcattcccaggcccattctattttattttctattttattttattttactttatttttttgtgtgtgttttattcttgagattgaatatttctgagttgtccaggctatccttgaattcactctataggccaagtatatcctttttttctttattttctttatttacatttcaaatgttnnnnnnnnnnnnnnnnnnnnnnnnnnnnnnnnnnnnnnnnnnnnnnnnnnnnnnnnnnnnnnnnnnnnnnnnnnnnnnnnnnnnnnnnnnnnnnnnnnnnnnnnnnnnnnnnnnnnnnnnnnnnnnnnnnnnnnnnnnnnnnnnnnnnnnnnnnnnnnnnnnnnnnnnnnnnnnnnnnnnnnnnnnnnnnnnnnnnnnnnnnnnnnnnnnnnnnnnnnnnnnnnnnnnnnnnnnnnnnnnnnnnnnnnnnnnnnnnnnnnnnnnnnnnnnnnnnnnnnnnnnnnnnnnnnnnnnnnnnnnnnnnnnnnnnnnnnnnnnnnnnnnnnnnnnnnnnnnnnnnnnnnnnnnnnnnnnnnnnnnnnnnnnnnnnnnnnnnnnnnnnnnnnnnnnnnnnnnnnnnnnnnnnnnnnnnnnnnnnnnnnnnnnnnnnnnnnnnnnnnnnnnnnnnnnnnnnnnnnnnnnnnnnnnnnnnnnnnnnnnnnnnnnnnnnnnnnnnnnnnnnnnnnnnnnnnnnnnnnnnnnnnnnnnnnnnnnnnnnnnnnnnnnnnnnnnnnnnnnnnnnnnnnnnnnnnnnnnnnnnnnnnnnnnnnnnnnnnnnnnnnnnnnnnnnnnnnnnnnnnnnnnnnnnnnnnnnnnnnnnnnnnnnnnnnnnnnnnnnnnnnnnnnnnnnnnnnnnnnnnnnnnnnnnnnnnnnnnnnnnnnnnnnnnnnnnnnnnnnnnnnnnnnnnnnnnnnnnnnnnnnnnnnnnnnnnnnnnnnnnnnnnnnnnnnnnnnnnnnnnnnnnnnnnnnnnnnnnnnnnnnnnnnnnnnnnnnnnnnnnnnnnnnnnnnnnnnnnnnnnnnnnnnnnnnnnnnnnnnnnnnnnnnnnnnnnnnnnnnnnnnnnnnnnnnnnnnnnnnnnnnnnnnnnnnnnnnnnnnnnnnnnnnnnnnnnnnnnnnnnnnnnnnnnnnnnnnnnnnnnnnnnnnnnnnnnnnnnnnnnnnnnnnnnnnnnnnnnnnnnnnnnnnnnnnnnnnnnnnnnnnnnnnnnnnnnnnnnnnnnnnnnnnnnnnnnnnnnnnnnnnnnnnnnnnnnnnnnnnnnnnnnnnnnnnnnnnnnnnnnnnnnnnnnnnnnnnnnnnnnnnnnnnnnnnnnnnnnnnnnnnnnnnnnnnnnnnnnnnnnnnnnnnnnnnnnnnnnnnnnnnnnnnnnnnnnnnnnnnnnnnnnnnnnnnnnnnnnnnnnnnnnnnnnnnnnnnnnnnnnnnnnnnnnnnnnnnnnnnnnnnnnnnnnnnnnnnnnnnnnnnnnnnnnnnnnnnnnnnnnnnnnnnnnnnnnnnnnnnnnnnnnnnnnnnnnnnnnnnnnnnnnnnnnnnnnnnnnnnnnnnnnnnnnnnnnnnnnnnnnnnnnnnnnnnnnnnnnnnnnnnnnnnnnnnnnnnnnnnnnnnnnnnnnnnnnnnnnnnnnnnnnnnnnnnnnnnnnnnnnnnnnnnnnnnnnnnnnnnnnnnnnnnnnnnnnnnnnnnnnnnnnnnnnnnnnnnnnnnnnnnnnnnnnnnnnnnnnnnnnnnnnnnnnnnnnnnnnnnnnnnnnnnnnnnnnnnnnnnnnnnnnnnnnnnnnnnnnnnnnnnnnnnnnnnnnnnnnnnnnnnnnnnnnnnnnnnnnnnnnnnnnnnnnnnnnnnnnnnnnnnnnnnnnnnnnnnnnnnnnnnnnnnnnnnnnnnnnnnnnnnnnnnnnnnnnnnnnnnnnnnnnnnnnnnnnnnnnnnnnnnnnnnnnnnnnnnnnnnnnnnnnnnnnnnnnnnnnnnnnnnnnnnnnnnnnnnnnnnnnnnnnnnnnnnnnnnnnnnnnnnnnnnnnnnnnnnnnnnnnnnnnnnnnnnnnnnnnnnnnnnnnnnnnnnnnnnnnnnnnnnnnnnnnnnnnnnnnnnnnnnnnnnnnnnnnnnnnnnnnnnnnnnnnnnnnnnnnnnnnnnnnnnnnnnnnnnnnnnnnnnnnnnnnnnnnnnnnnnnnnnnnnnnnnnnnnnnnnnnnnnnnnnnnnnnnnnnnnnnnnnnnnnnnnnnnnnnnnnnnnnnnnnnnnnnnnnnnnnnnnnnnnnnnnnnnnnnnnnnnnnnnnnnnnnnnnnnnnnnnnnnnnnnnnnnnnnnnnnnnnnnnnnnnnnnnnnnnnnnnnnnnnnnnnnnnnnnnnnnnnnnnnnnnnnnnnnnnnnnnnnnnnnnnnnnnnnnnnnnnnnnnnnnnnnnnnnnnnnnnnnnnnnnnnnnnnnnnnnnnnnnnnnnnnnnnnnnnnnnnnnnnnnnnnnnnnnnnnnnnnnnnnnnnnnnnnnnnnnnnnnnnnnnnnnnnnnnnnnnnnnnnnnnnnnnnnnnnnnnnnnnnnnnnnnnnnnnnnnnnnnnnnnnnnnnnnnnnnnnnnnnnnnnnnnnnnnnnnnnnnnnnnnnnnnnnnnnnnnnnnnnnnnnnnnnnnnnnnnnnnnnnnnnnnnnnnnnnnnnnnnnnnnnnnnnnnnnnnnnnnnnnnnnnnnnnnnnnnnnnnnnnnnnnnnnnnnnnnnnnnnnnnnnnnnnnnnnnnnnnnnnnnnnnnnnnnnnnnnnnnnnnnnnnnnnnnnnnnnnnnnnnnnnnnnnnnnnnnnnnnnnnnnnnnnnnnnnnnnnnnnnnnnnnnnnnnnnnnnnnnnnnnnnnnnnnnnnnnnnnnnnnnnnnnnnnnnnnnnnnnnnnnnnnnnnnnnnnnnnnnnnnnnnnnnnnnnnnnnnnnnnnnnnnnnnnnnnnnnnnnnnnnnnnnnnnnnnnnnnnnnnnnnnnnnnnnnnnnnnnnnnnnnnnnnnnnnnnnnnnnnnnnnnnnnnnnnnnnnnnnnnnnnnnnnnnnnnnnnnnnnnnnnnnnnnnnnnnnnnnnnnnnnnnnnnnnnnnnnnnnnnnnnnnnnnnnnnnnnnnnnnnnnnnnnnnnnnnnnnnnnnnnnnnnnnnnnnnnnnnnnnnnnnnnnnnnnnnnnnnnnnnnnnnnnnnnnnnnnnnnnnnnnnnnnnnnnnnnnnnnnnnnnnnnnnnnnnnnnnnnnnnnnnnnnnnnnnnnnnnnnnnnnnnnnnnnnnnnnnnnnnnnnnnnnnnnnnnnnnnnnnnnnnnnnnnnnnnnnnnnnnnnnnnnnnnnnnnnnnnnnnnnnnnnnnnnnnnnnnnnnnnnnnnnnnnnnnnnnnnnnnnnnnnnnnnnnnnnnnnnnnnnnnnnnnnnnnnnnnnnnnnnnnnnnnnnnnnnnnnnnnnnnnnnnnnnnnnnnnnnnnnnnnnnnnnnnnnnnnnnnnnnnnnnnnnnnnnnnnnnnnnnnnnnnnnnnnnnnnnnnnnnnnnnnnnnnnnnnnnnnnnnnnnnnnnnnnnnnnnnnnnnnnnnnnnnnnnnnnnnnnnnnnnnnnnnnnnnnnnnnnnnnnnnnnnnnnnnnnnnnnnnnnnnnnnnnnnnnnnnnnnnnnnnnnnnnnnnnnnnnnnnnnnnnnnnnnnnnnnnnnnnnnnnnnnnnnnnnnnnnnnnnnnnnnnnnnnnnnnnnnnnnnnnnnnnnnnnnnnnnnnnnnnnnnnnnnnnnnnnnnnnnnnnnnnnnnnnnnnnnnnnnnnnnnnnnnnnnnnnnnnnnnnnnnnnnnnnnnnnnnnnnnnnnnnnnnnnnnnnnnnnnnnnnnnnnnnnnnnnnnnnnnnnnnnnnnnnnnnnnnnnnnnnnnnnnnnnnnnnnnnnnnnnnnnnnnnnnnnnnnnnnnnnnnnnnnnnnnnnnnnnnnnnnnnnnnnnnnnnnnnnnnnnnnnnnnnnnnnnnnnnnnnnnnnnnnnnnnnnnnnnnnnnnnnnnnnnnnnnnnnnnnnnnnnnnnnnnnnnnnnnnnnnnnnnnnnnnnnnnnnnnnnnnnnnnnnnnnnnnnnnnnnnnnnnnnnnnnnnnnnnnnnnnnnnnnnnnnnnnnnnnnnnnnnnnnnnnnnnnnnnnnnnnnnnnnnnnnnnnnnnnnnnnnnnnnnnnnnnnnnnnnnnnnnnnnnnnnnnnnnnnnnnnnnnnnnnnnnnnnnnnnnnnnnnnnnnnnnnnnnnnnnnnnnnnnnnnnnnnnnnnnnnnnnnnnnnnnnnnnnnnnnnnnnnnnnnnnnnnnnnnnnnnnnnnnnnnnnnnnnnnnnnnnnnnnnnnnnnnnnnnnnnnnnnnnnnnnnnnnnnnnnnnnnnnnnnnnnnnnnnnnnnnnnnnnnnnnnnnnnnnnnnnnnnnnnnnnnnnnnnnnnnnnnnnnnnnnnnnnnnnnnnnnnnnnnnnnnnnnnnnnnnnnnnnnnnnnnnnnnnnnnnnnnnnnnnnnnnnnnnnnnnnnnnnnnnnnnnnnnnnnnnnnnnnnnnnnnnnnnnnnnnnnnnnnnnnnnnnnnnnnnnnnnnnnnnnnnnnnnnnnnnnnnnnnnnnnnnnnnnnnnnnnnnnnnnnnnnnnnnnnnnnnnnnnnnnnnnnnnnnnnnnnnnnnnnnnnnnnnnnnnnnnnnnnnnnnnnnnnnnnnnnnnnnnnnnnnnnnnnnnnnnnnnnnnnnnnnnnnnnnnnnnnnnnnnnnnnnnnnnnnnnnnnnnnnnnnnnnnnnnnnnnnnnnnnnnnnnnnnnnnnnnnnnnnnnnnnnnnnnnnnnnnnnnnnnnnnnnnnnnnnnnnnnnnnnnnnnnnnnnnnnnnnnnnnnnnnnnnnnnnnnnnnnnnnnnnnnnnnnnnnnnnnnnnnnnnnnnnnnnnnnnnnnnnnnnnnnnnnnnnnnnnnnnnnnnnnnnnnnnnnnnnnnnnnnnnnnnnnnnnnnnnnnnnnnnnnnnnnnnnnnnnnnnnnnnnnnnnnnnnnnnnnnnnnnnnnnnnnnnnnnnnnnnnnnnnnnnnnnnnnnnnnnnnnnnnnnnnnnnnnnnnnnnnnnnnnnnnnnnnnnnnnnnnnnnnnnnnnnnnnnnnnnnnnnnnnnnnnnnnnnnnnnnnnnnnnnnnnnnnnnnnnnnnnnnnnnnnnnnnnnnnnnnnnnnnnnnnnnnnnnnnnnnnnnnnnnnnnnnnnnnnnnnnnnnnnnnnnnnnnnnnnnnnnnnnnnnnnnnnnnnnnnnnnnnnnnnnnnnnnnnnnnnnnnnnnnnnnnnnnnnnnnnnnnnnnnnnnnnnnnnnnnnnnnnnnnnnnnnnnnnnnnnnnnnnnnnnnnnnnnnnnnnnnnnnnnnnnnnnnnnnnnnnnnnnnnnnnnnnnnnnnnnnnnnnnnnnnnnnnnnnnnnnnnnnnnnnnnnnnnnnnnnnnnnnnnnnnnnnnnnnnnnnnnnnnnnnnnnnnnnnnnnnnnnnnnnnnnnnnnnnnnnnnnnnnnnnnnnnnnnnnnnnnnnnnnnnnnnnnnnnnnnnnnnnnnnnnnnnnnnnnnnnnnnnnnnnnnnnnnnnnnnnnnnnnnnnnnnnnnnnnnnnnnnnnnnnnnnnnnnnnnnnnnnnnnnnnnnnnnnnnnnnnnnnnnnnnnnnnnnnnnnnnnnnnnnnnnnnnnnnnnnnnnnnnnnnnnnnnnnnnnnnnnnnnnnnnnnnnnnnnnnnnnnnnnnnnnnnnnnnnnnnnnnnnnnnnnnnnnnnnnnnnnnnnnnnnnnnnnnnnnnnnnnnnnnnnnnnnnnnnnnnnnnnnnnnnnnnnnnnnnnnnnnnnnnnnnnnnnnnnnnnnnnnnnnnnnnnnnnnnnnnnnnnnnnnnnnnnnnnnnnnnnnnnnnnnnnnnnnnnnnnnnnnnnnnnnnnnnnnnnnnnnnnnnnnnnnnnnnnnnnnnnnnnnnnnnnnnnnnnnnnnnnnnnnnnnnnnnnnnnnnnnnnnnnnnnnnnnnnnnnnnnnnnnnnnnnnnnnnnnnnnnnnnnnnnnnnnnnnnnnnnnnnnnnnnnnnnnnnnnnnnnnnnnnnnnnnnnnnnnnnnnnnnnnnnnnnnnnnnnnnnnnnnnnnnnnnnnnnnnnnnnnnnnnnnnnnnnnnnnnnnnnnnnnnnnnnnnnnnnnnnnnnnnnnnnnnnnnnnnnnnnnnnnnnnnnnnnnnnnnnnnnnnnnnnnnnnnnnnnnnnnnnnnnnnnnnnnnnnnnnnnnnnnnnnnnnnnnnnnnnnnnnnnnnnnnnnnnnnnnnnnnnnnnnnnnnnnnnnnnnnnnnnnnnnnnnnnnnnnnnnnnnnnnnnnnnnnnnnnnnnnnnnnnnnnnnnnnnnnnnnnnnnnnnnnnnnnnnnnnnnnnnnnnnnnnnnnnnnnnnnnnnnnnnnnnnnnnnnnnnnnnnnnnnnnnnnnnnnnnnnnnnnnnnnnnnnnnnnnnnnnnnnnnnnnnnnnnnnnnnnnnnnnnnnnnnnnnnnnnnnnnnnnnnnnnnnnnnnnnnnnnnnnnnnnnnnnnnnnnnnnnnnnnnnnnnnnnnnnnnnnnnnnnnnnnnnnnnnnnnnnnnnnnnnnnnnnnnnnnnnnnnnnnnnnnnnnnnnnnnnnnnnnnnnnnnnnnnnnnnnnnnnnnnnnnnnnnnnnnnnnnnnnnnnnnnnnnnnnnnnnnnnnnnnnnnnnnnnnnnnnnnnnnnnnnnnnnnnnnnnnnnnnnnnnnnnnnnnnnnnnnnnnnnnnnnnnnnnnnnnnnnnnnnnnnnnnnnnnnnnnnnnnnnnnnnnnnnnnnnnnnnnnnnnnnnnnnnnnnnnnnnnnnnnnnnnnnnnnnnnnnnnnnnnnnnnnnnnnnnnnnnnnnnnnnnnnnnnnnnnnnnnnnnnnnnnnnnnnnnnnnnnnnnnnnnnnnnnnnnnnnnnnnnnnnnnnnnnnnnnnnnnnnnnnnnnnnnnnnnnnnnnnnnnnnnnnnnnnnnnnnnnnnnnnnnnnnnnnnnnnnnnnnnnnnnnnnnnnnnnnnnnnnnnnnnnnnnnnnnnnnnnnnnnnnnnnnnnnnnnnnnnnnnnnnnnnnnnnnnnnnnnnnnnnnnnnnnnnnnnnnnnnnnnnnnnnnnnnnnnnnnnnnnnnnnnnnnnnnnnnnnnnnnnnnnnnnnnnnnnnnnnnnnnnnnnnnnnnnnnnnnnnnnnnnnnnnnnnnnnnnnnnnnnnnnnnnnnnnnnnnnnnnnnnnnnnnnnnnnnnnnnnnnnnnnnnnnnnnnnnnnnnnnnnnnnnnnnnnnnnnnnnnnnnnnnnnnnnnnnnnnnnnnnnnnnnnnnnnnnnnnnnnnnnnnnnnnnnnnnnnnnnnnnnnnnnnnnnnnnnnnnnnnnnnnnnnnnnnnnnnnnnnnnnnnnnnnnnnnnnnnnnnnnnnnnnnnnnnnnnnnnnnnnnnnnnnnnnnnnnnnnnnnnnnnnnnnnnnnnnnnnnnnnnnnnnnnnnnnnnnnnnnnnnnnnnnnnnnnnnnnnnnnnnnnnnnnnnnnnnnnnnnnnnnnnnnnnnnnnnnnnnnnnnnnnnnnnnnnnnnnnnnnnnnnnnnnnnnnnnnnnnnnnnnnnnnnnnnnnnnnnnnnnnnnnnnnnnnnnnnnnnnnnnnnnnnnnnnnnnnnnnnnnnnnnnnnnnnnnnnnnnnnnnnnnnnnnnnnnnnnnnnnnnnnnnnnnnnnnnnnnnnnnnnnnnnnnnnnnnnnnnnnnnnnnnnnnnnnnnnnnnnnnnnnnnnnnnnnnnnnnnnnnnnnnnnnnnnnnnnnnnnnnnnnnnnnnnnnnnnnnnnnnnnnnnnnnnnnnnnnnnnnnnnnnnnnnnnnnnnnnnnnnnnnnnnnnnnnnnnnnnnnnnnnnnnnnnnnnnnnnnnnnnnnnnnnnnnnnnnnnnnnnnnnnnnnnnnnnnnnnnnnnnnnnnnnnnnnnnnnnnnnnnnnnnnnnnnnnnnnnnnnnnnnnnnnnnnnnnnnnnnnnnnnnnnnnnnnnnnnnnnnnnnnnnnnnnnnnnnnnnnnnnnnnnnnnnnnnnnnnnnnnnnnnnnnnnnnnnnnnnnnnnnnnnnnnnnnnnnnnnnnnnnnnnnnnnnnnnnnnnnnnnnnnnnnnnnnnnnnnnnnnnnnnnnnnnnnnnnnnnnnnnnnnnnnnnnnnnnnnnnnnnnnnnnnnnnnnnnnnnnnnnnnnnnnnnnnnnnnnnnnnnnnnnnnnnnnnnnnnnnnnnnnnnnnnnnnnnnnnnnnnnnnnnnnnnnnnnnnnnnnnnnnnnnnnnnnnnnnnnnnnnnnnnnnnnnnnnnnnnnnnnnnnnnnnnnnnnnnnnnnnnnnnnnnnnnnnnnnnnnnnnnnnnnnnnnnnnnnnnnnnnnnnnnnnnnnnnnnnnnnnnnnnnnnnnnnnnnnnnnnnnnnnnnnnnnnnnnnnnnnnnnnnnnnnnnnnnnnnnnnnnnnnnnnnnnnnnnnnnnnnnnnnnnnnnnnnnnnnnnnnnnnnnnnnnnnnnnnnnnnnnnnnnnnnnnnnnnnnnnnnnnnnnnnnnnnnnnnnnnnnnnnnnnnnnnnnnnnnnnnnnnnnnnnnnnnnnnnnnnnnnnnnnnnnnnnnnnnnnnnnnnnnnnnnnnnnnnnnnnnnnnnnnnnnnnnnnnnnnnnnnnnnnnnnnnnnnnnnnnnnnnnnnnnnnnnnnnnnnnnnnnnnnnnnnnnnnnnnnnnnnnnnnnnnnnnnnnnnnnnnnnnnnnnnnnnnnnnnnnnnnnnnnnnnnnnnnnnnnnnnnnnnnnnnnnnnnnnnnnnnnnnnnnnnnnnnnnnnnnnnnnnnnnnnnnnnnnnnnnnnnnnnnnnnnnnnnnnnnnnnnnnnnnnnnnnnnnnnnnnnnnnnnnnnnnnnnnnnnnnnnnnnnnnnnnnnnnnnnnnnnnnnnnnnnnnnnnnnnnnnnnnnnnnnnnnnnnnnnnnnnnnnnnnnnnnnnnnnnnnnnnnnnnnnnnnnnnnnnnnnnnnnnnnnnnnnnnnnnnnnnnnnnnnnnnnnnnnnnnnnnnnnnnnnnnnnnnnnnnnnnnnnnnnnnnnnnnnnnnnnnnnnnnnnnnnnnnnnnnnnnnnnnnnnnnnnnnnnnnnnnnnnnnnnnnnnnnnnnnnnnnnnnnnnnnnnnnnnnnnnnnnnnnnnnnnnnnnnnnnnnnnnnnnnnnnnnnnnnnnnnnnnnnnnnnnnnnnnnnnnnnnnnnnnnnnnnnnnnnnnnnnnnnnnnnnnnnnnnnnnnnnnnnnnnnnnnnnnnnnnnnnnnnnnnnnnnnnnnnnnnnnnnnnnnnnnnnnnnnnnnnnnnnnnnnnnnnnnnnnnnnnnnnnnnnnnnnnnnnnnnnnnnnnnnnnnnnnnnnnnnnnnnnnnnnnnnnnnnnnnnnnnnnnnnnnnnnnnnnnnnnnnnnnnnnnnnnnnnnnnnnnnnnnnnnnnnnnnnnnnnnnnnnnnnnnnnnnnnnnnnnnnnnnnnnnnnnnnnnnnnnnnnnnnnnnnnnnnnnnnnnnnnnnnnnnnnnnnnnnnnnnnnnnnnnnnnnnnnnnnnnnnnnnnnnnnnnnnnnnnnnnnnnnnnnnnnnnnnnnnnnnnnnnnnnnnnnnnnnnnnnnnnnnnnnnnnnnnnnnnnnnnnnnnnnnnnnnnnnnnnnnnnnnnnnnnnnnnnnnnnnnnnnnnnnnnnnnnnnnnnnnnnnnnnnnnnnnnnnnnnnnnnnnnnnnnnnnnnnnnnnnnnnnnnnnnnnnnnnnnnnnnnnnnnnnnnnnnnnnnnnnnnnnnnnnnnnnnnnnnnnnnnnnnnnnnnnnnnnnnnnnnnnnnnnnnnnnnnnnnnnnnnnnnnnnnnnnnnnnnnnnnnnnnnnnnnnnnnnnnnnnnnnnnnnnnnnnnnnnnnnnnnnnnnnnnnnnnnnnnnnnnnnnnnnnnnnnnnnnnnnnnnnnnnnnnnnnnnnnnnnnnnnnnnnnnnnnnnnnnnnnnnnnnnnnnnnnnnnnnnnnnnnnnnnnnnnnnnnnnnnnnnnnnnnnnnnnnnnnnnnnnnnnnnnnnnnnnnnnnnnnnnnnnnnnnnnnnnnnnnnnnnnnnnnnnnnnnnnnnnnnnnnnnnnnnnnnnnnnnnnnnnnnnnnnnnnnnnnnnnnnnnnnnnnnnnnnnnnnnnnnnnnnnnnnnnnnnnnnnnnnnnnnnnnnnnnnnnnnnnnnnnnnnnnnnnnnnnnnnnnnnnnnnnnnnnnnnnnnnnnnnnnnnnnnnnnnnnnnnnnnnnnnnnnnnnnnnnnnnnnnnnnnnnnnnnnnnnnnnnnnnnnnnnnnnnnnnnnnnnnnnnnnnnnnnnnnnnnnnnnnnnnnnnnnnnnnnnnnnnnnnnnnnnnnnnnnnnnnnnnnnnnnnnnnnnnnnnnnnnnnnnnnnnnnnnnnnnnnnnnnnnnnnnnnnnnnnnnnnnnnnnnnnnnnnnnnnnnnnnnnnnnnnnnnnnnnnnnnnnnnnnnnnnnnnnnnnnnnnnnnnnnnnnnnnnnnnnnnnnnnnnnnnnnnnnnnnnnnnnnnnnnnnnnnnnnnnnnnnnnnnnnnnnnnnnnnnnnnnnnnnnnnnnnnnnnnnnnnnnnnnnnnnnnnnnnnnnnnnnnnnnnnnnnnnnnnnnnnnnnnnnnnnnnnnnnnnnnnnnnnnnnnnnnnnnnnnnnnnnnnnnnnnnnnnnnnnnnnnnnnnnnnnnnnnnnnnnnnnnnnnnnnnnnnnnnnnnnnnnnnnnnnnnnnnnnnnnnnnnnnnnnnnnnnnnnnnnnnnnnnnnnnnnnnnnnnnnnnnnnnnnnnnnnnnnnnnnnnnnnnnnnnnnnnnnnnnnnnnnnnnnnnnnnnnnnnnnnnnnnnnnnnnnnnnnnnnnnnnnnnnnnnnnnnnnnnnnnnnnnnnnnnnnnnnnnnnnnnnnnnnnnnnnnnnnnnnnnnnnnnnnnnnnnnnnnnnnnnnnnnnnnnnnnnnnnnnnnnnnnnnnnnnnnnnnnnnnnnnnnnnnnnnnnnnnnnnnnnnnnnnnnnnnnnnnnnnnnnnnnnnnnnnnnnnnnnnnnnnnnnnnnnnnnnnnnnnnnnnnnnnnnnnnnnnnnnnnnnnnnnnnnnnnnnnnnnnnnnnnnnnnnnnnnnnnnnnnnnnnnnnnnnnnnnnnnnnnnnnnnnnnnnnnnnnnnnnnnnnnnnnnnnnnnnnnnnnnnnnnnnnnnnnnnnnnnnnnnnnnnnnnnnnnnnnnnnnnnnnnnnnnnnnnnnnnnnnnnnnnnnnnnnnnnnnnnnnnnnnnnnnnnnnnnnnnnnnnnnnnnnnnnnnnnnnnnnnnnnnnnnnnnnnnnnnnnnnnnnnnnnnnnnnnnnnnnnnnnnnnnnnnnnnnnnnnnnnnnnnnnnnnnnnnnnnnnnnnnnnnnnnnnnnnnnnnnnnnnnnnnnnnnnnnnnnnnnnnnnnnnnnnnnnnnnnnnnnnnnnnnnnnnnnnnnnnnnnnnnnnnnnnnnnnnnnnnnnnnnnnnnnnnnnnnnnnnnnnnnnnnnnnnnnnnnnnnnnnnnnnnnnnnnnnnnnnnnnnnnnnnnnnnnnnnnnnnnnnnnnnnnnnnnnnnnnnnnnnnnnnnnnnnnnnnnnnnnnnnnnnnnnnnnnnnnnnnnnnnnnnnnnnnnnnnnnnnnnnnnnnnnnnnnnnnnnnnnnnnnnnnnnnnnnnnnnnnnnnnnnnnnnnnnnnnnnnnnnnnnnnnnnnnnnnnnnnnnnnnnnnnnnnnnnnnnnnnnnnnnnnnnnnnnnnnnnnnnnnnnnnnnnnnnnnnnnnnnnnnnnnnnnnnnnnnnnnnnnnnnnnnnnnnnnnnnnnnnnnnnnnnnnnnnnnnnnnnnnnnnnnnnnnnnnnnnnnnnnnnnnnnnnnnnnnnnnnnnnnnnnnnnnnnnnnnnnnnnnnnnnnnnnnnnnnnnnnnnnnnnnnnnnnnnnnnnnnnnnnnnnnnnnnnnnnnnnnnnnnnnnnnnnnnnnnnnnnnnnnnnnnnnnnnnnnnnnnnnnnnnnnnnnnnnnnnnnnnnnnnnnnnnnnnnnnnnnnnnnnnnnnnnnnnnnnnnnnnnnnnnnnnnnnnnnnnnnnnnnnnnnnnnnnnnnnnnnnnnnnnnnnnnnnnnnnnnnnnnnnnnnnnnnnnnnnnnnnnnnnnnnnnnnnnnnnnnnnnnnnnnnnnnnnnnnnnnnnnnnnnnnnnnnnnnnnnnnnnnnnnnnnnnnnnnnnnnnnnnnnnnnnnnnnnnnnnnnnnnnnnnnnnnnnnnnnnnnnnnnnnnnnnnnnnnnnnnnnnnnnnnnnnnnnnnnnnnnnnnnnnnnnnnnnnnnnnnnnnnnnnnnnnnnnnnnnnnnnnnnnnnnnnnnnnnnnnnnnnnnnnnnnnnnnnnnnnnnnnnnnnnnnnnnnnnnnnnnnnnnnnnnnnnnnnnnnnnnnnnnnnnnnnnnnnnnnnnnnnnnnnnnnnnnnnnnnnnnnnnnnnnnnnnnnnnnnnnnnnnnnnnnnnnnnnnnnnnnnnnnnnnnnnnnnnnnnnnnnnnnnnnnnnnnnnnnnnnnnnnnnnnnnnnnnnnnnnnnnnnnnnnnnnnnnnnnnnnnnnnnnnnnnnnnnnnnnnnnnnnnnnnnnnnnnnnnnnnnnnnnnnnnnnnnnnnnnnnnnnnnnnnnnnnnnnnnnnnnnnnnnnnnnnnnnnnnnnnnnnnnnnnnnnnnnnnnnnnnnnnnnnnnnnnnnnnnnnnnnnnnnnnnnnnnnnnnnnnnnnnnnnnnnnnnnnnnnnnnnnnnnnnnnnnnnnnnnnnnnnnnnnnnnnnnnnnnnnnnnnnnnnnnnnnnnnnnnnnnnnnnnnnnnnnnnnnnnnnnnnnnnnnnnnnnnnnnnnnnnnnnnnnnnnnnnnnnnnnnnnnnnnnnnnnnnnnnnnnnnnnnnnnnnnnnnnnnnnnnnnnnnnnnnnnnnnnnnnnnnnnnnnnnnnnnnnnnnnnnnnnnnnnnnnnnnnnnnnnnnnnnnnnnnnnnnnnnnnnnnnnnnnnnnnnnnnnnnnnnnnnnnnnnnnnnnnnnnnnnnnnnnnnnnnnnnnnnnnnnnnnnnnnnnnnnnnnnnnnnnnnnnnnnnnnnnnnnnnnnnnnnnnnnnnnnnnnnnnnnnnnnnnnnnnnnnnnnnnnnnnnnnnnnnnnnnnnnnnnnnnnnnnnnnnnnnnnnnnnnnnnnnnnnnnnnnnnnnnnnnnnnnnnnnnnnnnnnnnnnnnnnnnnnnnnnnnnnnnnnnnnnnnnnnnnnnnnnnnnnnnnnnnnnnnnnnnnnnnnnnnnnnnnnnnnnnnnnnnnnnnnnnnnnnnnnnnnnnnnnnnnnnnnnnnnnnnnnnnnnnnnnnnnnnnnnnnnnnnnnnnnnnnnnnnnnnnnnnnnnnnnnnnnnnnnnnnnnnnnnnnnnnnnnnnnnnnnnnnnnnnnnnnnnnnnnnnnnnnnnnnnnnnnnnnnnnnnnnnnnnnnnnnnnnnnnnnnnnnnnnnnnnnnnnnnnnnnnnnnnnnnnnnnnnnnnnnnnnnnnnnnnnnnnnnnnnnnnnnnnnnnnnnnnnnnnnnnnnnnnnnnnnnnnnnnnnnnnnnnnnnnnnnnnnnnnnnnnnnnnnnnnnnnnnnnnnnnnnnnnnnnnnnnnnnnnnnnnnnnnnnnnnnnnnnnnnnnnnnnnnnnnnnnnnnnnnnnnnnnnnnnnnnnnnnnnnnnnnnnnnnnnnnnnnnnnnnnnnnnnnnnnnnnnnnnnnnnnnnnnnnnnnnnnnnnnnnnnnnnnnnnnnnnnnnnnnnnnnnnnnnnnnnnnnnnnnnnnnnnnnnnnnnnnnnnnnnnnnnnnnnnnnnnnnnnnnnnnnnnnnnnnnnnnnnnnnnnnnnnnnnnnnnnnnnnnnnnnnnnnnnnnnnnnnnnnnnnnnnnnnnnnnnnnnnnnnnnnnnnnnnnnnnnnnnnnnnnnnnnnnnnnnnnnnnnnnnnnnnnnnnnnnnnnnnnnnnnnnnnnnnnnnnnnnnnnnnnnnnnnnnnnnnnnnnnnnnnnnnnnnnnnnnnnnnnnnnnnnnnnnnnnnnnnnnnnnnnnnnnnnnnnnnnnnnnnnnnnnnnnnnnnnnnnnnnnnnnnnnnnnnnnnnnnnnnnnnnnnnnnnnnnnnnnnnnnnnnnnnnnnnnnnnnnnnnnnnnnnnnnnnnnnnnnnnnnnnnnnnnnnnnnnnnnnnnnnnnnnnnnnnnnnnnnnnnnnnnnnnnnnnnnnnnnnnnnnnnnnnnnnnnnnnnnnnnnnnnnnnnnnnnnnnnnnnnnnnnnnnnnnnnnnnnnnnnnnnnnnnnnnnnnnnnnnnnnnnnnnnnnnnnnnnnnnnnnnnnnnnnnnnnnnnnnnnnnnnnnnnnnnnnnnnnnnnnnnnnnnnnnnnnnnnnnnnnnnnnnnnnnnnnnnnnnnnnnnnnnnnnnnnnnnnnnnnnnnnnnnnnnnnnnnnnnnnnnnnnnnnnnnnnnnnnnnnnnnnnnnnnnnnnnnnnnnnnnnnnnnnnnnnnnnnnnnnnnnnnnnnnnnnnnnnnnnnnnnnnnnnnnnnnnnnnnnnnnnnnnnnnnnnnnnnnnnnnnnnnnnnnnnnnnnnnnnnnnnnnnnnnnnnnnnnnnnnnnnnnnnnnnnnnnnnnnnnnnnnnnnnnnnnnnnnnnnnnnnnnnnnnnnnnnnnnnnnnnnnnnnnnnnnnnnnnnnnnnnnnnnnnnnnnnnnnnnnnnnnnnnnnnnnnnnnnnnnnnnnnnnnnnnnnnnnnnnnnnnnnnnnnnnnnnnnnnnnnnnnnnnnnnnnnnnnnnnnnnnnnnnnnnnnnnnnnnnnnnnnnnnnnnnnnnnnnnnnnnnnnnnnnnnnnnnnnnnnnnnnnnnnnnnnnnnnnnnnnnnnnnnnnnnnnnnnnnnnnnnnnnnnnnnnnnnnnnnnnnnnnnnnnnnnnnnnnnnnnnnnnnnnnnnnnnnnnnnnnnnnnnnnnnnnnnnnnnnnnnnnnnnnnnnnnnnnnnnnnnnnnnnnnnnnnnnnnnnnnnnnnnnnnnnnnnnnnnnnnnnnnnnnnnnnnnnnnnnnnnnnnnnnnnnnnnnnnnnnnnnnnnnnnnnnnnnnnnnnnnnnnnnnnnnnnnnnnnnnnnnnnnnnnnnnnnnnnnnnnnnnnnnnnnnnnnnnnnnnnnnnnnnnnnnnnnnnnnnnnnnnnnnnnnnnnnnnnnnnnnnnnnnnnnnnnnnnnnnnnnnnnnnnnnnnnnnnnnnnnnnnnnnnnnnnnnnnnnnnnnnnnnnnnnnnnnnnnnnnnnnnnnnnnnnnnnnnnnnnnnnnnnnnnnnnnnnnnnnnnnnnnnnnnnnnnnnnnnnnnnnnnnnnnnnnnnnnnnnnnnnnnnnnnnnnnnnnnnnnnnnnnnnnnnnnnnnnnnnnnnnnnnnnnnnnnnnnnnnnnnnnnnnnnnnnnnnnnnnnnnnnnnnnnnnnnnnnnnnnnnnnnnnnnnnnnnnnnnnnnnnnnnnnnnnnnnnnnnnnnnnnnnnnnnnnnnnnnnnnnnnnnnnnnnnnnnnnnnnnnnnnnnnnnnnnnnnnnnnnnnnnnnnnnnnnnnnnnnnnnnnnnnnnnnnnnnnnnnnnnnnnnnnnnnnnnnnnnnnnnnnnnnnnnnnnnnnnnnnnnnnnnnnnnnnnnnnnnnnnnnnnnnnnnnnnnnnnnnnnnnnnnnnnnnnnnnnnnnnnnnnnnnnnnnnnnnnnnnnnnnnnnnnnnnnnnnnnnnnnnnnnnnnnnnnnnnnnnnnnnnnnnnnnnnnnnnnnnnnnnnnnnnnnnnnnnnnnnnnnnnnnnnnnnnnnnnnnnnnnnnnnnnnnnnnnnnnnnnnnnnnnnnnnnnnnnnnnnnnnnnnnnnnnnnnnnnnnnnnnnnnnnnnnnnnnnnnnnnnnnnnnnnnnnnnnnnnnnnnnnnnnnnnnnnnnnnnnnnnnnnnnnnnnnnnnnnnnnnnnnnnnnnnnnnnnnnnnnnnnnnnnnnnnnnnnnnnnnnnnnnnnnnnnnnnnnnnnnnnnnnnnnnnnnnnnnnnnnnnnnnnnnnnnnnnnnnnnnnnnnnnnnnnnnnnnnnnnnnnnnnnnnnnnnnnnnnnnnnnnnnnnnnnnnnnnnnnnnnnnnnnnnnnnnnnnnnnnnnnnnnnnnnnnnnnnnnnnnnnnnnnnnnnnnnnnnnnnnnnnnnnnnnnnnnnnnnnnnnnnnnnnnnnnnnnnnnnnnnnnnnnnnnnnnnnnnnnnnnnnnnnnnnnnnnnnnnnnnnnnnnnnnnnnnnnnnnnnnnnnnnnnnnnnnnnnnnnnnnnnnnnnnnnnnnnnnnnnnnnnnnnnnnnnnnnnnnnnnnnnnnnnnnnnnnnnnnnnnnnnnnnnnnnnnnnnnnnnnnnnnnnnnnnnnnnnnnnnnnnnnnnnnnnnnnnnnnnnnnnnnnnnnnnnnnnnnnnnnnnnnnnnnnnnnnnnnnnnnnnnnnnnnnnnnnnnnnnnnnnnnnnnnnnnnnnnnnnnnnnnnnnnnnnnnnnnnnnnnnnnnnnnnnnnnnnnnnnnnnnnnnnnnnnnnnnnnnnnnnnnnnnnnnnnnnnnnnnnnnnnnnnnnnnnnnnnnnnnnnnnnnnnnnnnnnnnnnnnnnnnnnnnnnnnnnnnnnnnnnnnnnnnnnnnnnnnnnnnnnnnnnnnnnnnnnnnnnnnnnnnnnnnnnnnnnnnnnnnnnnnnnnnnnnnnnnnnnnnnnnnnnnnnnnnnnnnnnnnnnnnnnnnnnnnnnnnnnnnnnnnnnnnnnnnnnnnnnnnnnnnnnnnnnnnnnnnnnnnnnnnnnnnnnnnnnnnnnnnnnnnnnnnnnnnnnnnnnnnnnnnnnnnnnnnnnnnnnnnnnnnnnnnnnnnnnnnnnnnnnnnnnnnnnnnnnnnnnnnnnnnnnnnnnnnnnnnnnnnnnnnnnnnnnnnnnnnnnnnnnnnnnnnnnnnnnnnnnnnnnnnnnnnnnnnnnnnnnnnnnnnnnnnnnnnnnnnnnnnnnnnnnnnnnnnnnnnnnnnnnnnnnnnnnnnnnnnnnnnnnnnnnnnnnnnnnnnnnnnnnnnnnnnnnnnnnnnnnnnnnnnnnnnnnnnnnnnnnnnnnnnnnnnnnnnnnnnnnnnnnnnnnnnnnnnnnnnnnnnnnnnnnnnnnnnnnnnnnnnnnnnnnnnnnnnnnnnnnnnnnnnnnnnnnnnnnnnnnnnnnnnnnnnnnnnnnnnnnnnnnnnnnnnnnnnnnnnnnnnnnnnnnnnnnnnnnnnnnnnnnnnnnnnnnnnnnnnnnnnnnnnnnnnnnnnnnnnnnnnnnnnnnnnnnnnnnnnnnnnnnnnnnnnnnnnnnnnnnnnnnnnnnnnnnnnnnnnnnnnnnnnnnnnnnnnnnnnnnnnnnnnnnnnnnnnnnnnnnnnnnnnnnnnnnnnnnnnnnnnnnnnnnnnnnnnnnnnnnnnnnnnnnnnnnnnnnnnnnnnnnnnnnnnnnnnnnnnnnnnnnnnnnnnnnnnnnnnnnnnnnnnnnnnnnnnnnnnnnnnnnnnnnnnnnnnnnnnnnnnnnnnnnnnnnnnnnnnnnnnnnnnnnnnnnnnnnnnnnnnnnnnnnnnnnnnnnnnnnnnnnnnnnnnnnnnnnnnnnnnnnnnnnnnnnnnnnnnnnnnnnnnnnnnnnnnnnnnnnnnnnnnnnnnnnnnnnnnnnnnnnnnnnnnnnnnnnnnnnnnnnnnnnnnnnnnnnnnnnnnnnnnnnnnnnnnnnnnnnnnnnnnnnnnnnnnnnnnnnnnnnnnnnnnnnnnnnnnnnnnnnnnnnnnnnnnnnnnnnnnnnnnnnnnnnnnnnnnnnnnnnnnnnnnnnnnnnnnnnnnnnnnnnnnnnnnnnnnnnnnnnnnnnnnnnnnnnnnnnnnnnnaatatagcatgcatacacatgagaggagtcaagcagggagttttgctggaaacgtgcaaaaaaaattgctgtgaggaaggggctgttttgtatggtgaggaagagaggtagtgttttcctgcaaggtaagattatttctcctgaaggaatgaccttggcagttgccaggggtcacaattgccgaacaaattggtagcagctagaatcagaagtgctttccttgcttacacaaaataactgtgtgcctagagaggtgaggcagaagcacagagccgcagggaggagagccagccacagagcagccgcagtagcaatccagaggagttctagaagaaccaagagaggaacatcccaaatggcaggcaaacctcagaaagtgcatggcaaagcaaggacaggcatcacacattaagaagagtgttagggaaaagtggggtctctggagtgaaagtatagaacaagttggtaaatgagcaccatacaaaaagaaaatgagctgaaccctctgtaccttttgttcatatagccaaggacagagcaagctcaagggagacgatcattgcttatttctaaacacataggaccagaaaacacattgggcatactgaaaatagatctctctaattcagccaacaatttaacccattgcttctcaaacaatgtgcagagagctcagctgggagcctcttttaatggatacttgggtttcatagatctggggtggggactgagattggatttctgacttccttgtgaccacgtgttttcctgaaagtacctcattgctgctgattcatggtgatcctgtccacaccacactctaaacagccatggccatgacttagcaaaccaaactcgctgtgaaaggaccaaaggagaaccaaaagagggttctaaagaactgagagggttataaaacgacctaaggcaaaaatcccagctctcaagaggtacaattagagaacttttcccagttgacagtcccaagcctggagaagggagatttggtaactaaaattacgcatgcaatttggtaatggggagattctattaaatttttgctcagtacagccctcttaactttttgcttatgtattgttttttacctttgttgagtgtttatgtgtgtagtatgcaggtcacacgcactcctcatttgtcacccagccaagccagcttgcccaaggatctgctgtccctggcttccaagtagtgaggtcacaatcaggctgccacaactttctggcttttatgtgggtgctggagatgcaacccaggtcttcatgcatgtatgacgctctacccactgagctttcctcccaatctgccatcagaactcttcattacaggaacaaaaactatcatccaacaatggctttcttctccacacactctgtcttgtcacataaaaaagaagcacgggcttacagggtctttgtttgtttgtttgtttgtttgtgtttgtttttgttttttatcttgacgtatattgctacagtagtttagtgacataaggtctgattttaaaatagagtagattaattgtgtggcaaaggtgtagaaataggaatgctacagacattgcagacaaactttctgcattaactctttaagttgtccattaaatacctggctctatctttgtacctctgtgaaaggcatcaagtggtctggacttcagaaaaccttggaggatattccagtctcctctatacatctctatcagcgtggctcccaggcaacagaccaaaaaatgatagcaactaaacccatagtagactacagtgagattgtgtgtgttagaacacctcagtaccaaggacaagaagcccacttccatgaagagagatccactatttcaatgtgggcttccactccatggttacctcacaagtaacagtcatttctgacctgtcctttaaggtgcccaccctctctagacaatgaaacttctcttgctatgttatataattatttcctgatgtgtttatgtatacaaactggcataatgcttcccatgggccagcgtcatcatatacacttacatattagaattagaaattcgtgtatgaaaggagttatgaaggctgttttgcactggtcagttttcctgatttggtgcgtccatattagcttttgcctctcagctcatgtctgaggtctaggaattagccttcatggctttcaattgagtctcactttggggctagatccacgatatgctgcttcatagaagaagaatcattagagcgtgtgacagtggtcagtacactcatttattcaccaactgagcaaactagagctgccacttttcctggtatggagagcaggtgaattgccgtcatggccagatgatgaatacactctcaaaagcaaaaattgagagtaaagaaacgaggttaaaggagatgtctaaatgcaatggaaccagaaaattgactacaactggtcaattgcctacacacttcaaagctcagtacagaaagccatttgattgtcatcagaaaagcacaattagaagatgactcacagatacttgccacttatgagatggctgtgctaattttccttaggatccataagctagaacaatcagtagataggagtctctgcagctcaccatacaagctgctgttaaaaatgatagctttaacgacacttgaggtgccactctcaggataaatgtcaaagagaccacaggagagacactggagcatacctttggcatctgtgattgtaaaaaccacaaactatagatctcacactcaaggggagagcttagggcttatcctctccaggatcattttaagtgatgatcactatcaaacctgactctggaccccaccaagttatgaaagtcctccttcttaacagatgaataacagagaagccactgggtggtattttattattttcatattgctgctgtataaattttcacaaagctggttccagagagcacacagatgttctgtcttgctgctctgcagatcagaatccaaaatgagactagactaaagtaggtgcctgtacagctgctttccttctggggactgtagaagagaaccatctggttaccagacctggggtatttgtccttatcttctgacccttcgcctatcattcacatcatttgacctcagctcccccatctctggttctaagccaccctcctcctcctagagaattcttttgattactttagacccacttggataatccagataatcttcctatccaaggacatcagccatgtaagtcaacaaaatcacatgttgtagttccagagattaggatgtgagcatatttggggggctacaccacagaccatattttcattgaagacttaacaaaagaagaagtaaaacagcccacatctgccctggaagaggcaagtagatgggggactaaagagctcaggagaagtcgtccactaggcaaaaagaaacctgattcacccaactacaattttgccaatttgaagcctttacaaactctcacataatctcttattccaagaagctctctctaaattatatccatcatcatcattatgtttttaatcagctaaacaattacagtaatgtctgtgttctgaaaacagggacatgcgagttggctgctctcccaggaacccttctgcatttcttttcacctctgagtctgagtaaaatcatctcccacaagttatgtaaccaaagcagaacaactccaggtagatgcgccctggcaaaagctcccttgggtacaaacaccaaagagaatgtggtagagtggctatccattgcttttgcctgcaaacaagcattgacatgagggggtagtttacaaactatgtaactttggacagaaacactgtagaaaacggaagactgtctcccctgcaatcacagacaggactgtccagtccacttccttaatctctgtatccctcctacccacttattcagcctcctgccatttgtcaagacagtgggatgcagtgtatggtttccccaaaataattggagaagagctgcctggtgtgtggattcagtaggcagatacttaggctcgtcactcagaaattctgatttttttttttccgttttggcagggatcttgttatctacttgaatagatgattcagtgattcttattatcagaccaggatgagcagggctgacaggatgaaacaggatgggcttagaaattggccttggaaattagacacacttgaatacagcttttcaagctggtagaggtgaagaagttgcttagctacactgagcctatacagtcaaaatgtataggttattggagagctgaataagatagtgtatccatttggttgtatccaaacaatctacagtttaatcattaatcattttattttattttattttattttattttattttattggggggggttgttattgttgttattgttgtttttcaagacagggtttctctgactgtcctggaactctgtagaccaggctagcctcgaactcggaaatccacctgcctctgcctccctagtgctgggattaaaggtgtgcaccaccactgcctggctaatcattgtcaatgatcagtggtcaccctcccttttttctcccttccttctcccttccctccttccatccttcacaccatgtcttttcctatgatacctgccatattgggattttcacagcagaagaatgtctactgattctgaaaatgtcatacaataacaaccagaaatacttggttaattcctctgccaggacaggccctttcccatccaccagttgtcaacttcatcatgcaattgcgtagccccttggcactctctctttcacatagcttcctcatacttacaaggaattgttcacaaaggctcctctctcttagagcaccctgctgcacacagaaagctaatatcgtgcagccattgctccaggaagtgtccaggaactggttgcatcttattctggagaaaataaaatagcaagccagttttgctgaccaacaggatgaggttacacatacatttcaggagacgctcctgctgcatggagtccctgtcatcacatttaatgtcttgtatctaccagcatcagagtcaccatggggatcacatgacacatccagtcttgatgtgtattttgcatttgctggaacattaggtatatttcaaagaccacctccatagctagtttgaaatcttaaggctcagctagaattagaaaggcagtctgttcttagtaactacaaagaatcttgggagtatatttgacttgtatgtgttctctctctctctctctctctctctctctctctctctctctctctcttagttaaaactattttattttttatttttatttttttctctatggtaatttttatttttatcatatattttctttatttacatttcaaatattatcccctttcctagtttcccctccaaaaatcccctatccctcccctccccctgctccccaacccactcactcccatttccagtcctggcattttccctatattggggcatggaaccttcacatgacctagggcctctcttcccattgatggccaattaggccatcctcatctaaatatacagctagagccacatgtcccaccatgtgttttctttgattggtggtttagttccaaggagctctgggggtactgattagttcatattgatgttcctcctatgaggctgcaaaccccttcagctccttgggtactttctctagctccttcattggggaccttgtgctccgtcctatggatgattgtgagcatcctcttctgtacttgccaggcactggcagagcccctcaggagatagctatatcaggctcctgtcagctaactcttgttggcatctgccatagtgtctgggcttggtggttgtttatgggatggatctccaagtggggcagtctctggatagtcattccttcaggctctgctccaaactttgtctctgtaactctttccatgggcattttgttccccctttaagaaggattctgagcttctgggataatatctacttatcaatgagtgcataccatgtgtgttattccgtgattgggttacctcactcaagatgatatcctccagatccatccatttgtctaagaatttcataaactcattgtttttaatagctggatagtactccattgtgtaaatgtaccacattttctgtatccattcctctgttgagggacatctgggttctttccagcttctggctattatggtgcaggttcacagagacctaaccactgtgaccctcttctccaattcttgacattataggtaagtgacaatgtgttctccagaccacagagcagttgtaagaagtgcagcctccaggtccatgtgtcagacatactgaaacaaaaattctaggaattaactcagaaataaacagttgaaagcacaccaattggttatccaatatccaatggtcagcccttgaaaacatacatacataacattatacagactgagcatgctgtacttaaagtacttaggaaaaactgtattgtacaaaatacacacatatacatgtaacagttaatgaaaaagaagccatgaattcgaaagaggatgagcaggggggtatatgggaggattttgaggaaggacgaggaaggaggtgatataattctattataagctcaaactcaagagataatctttaagagccttaaatgatcgagacacatattggtttaacattggctgcactacagccatctctgtcttttacccatctcttgagagtaacctcataatatgctgctagcttagattaccactgcccattcaaaggctgcataggagtatccccactatgccaactgcattgtcttcccaagatcatcttggaaaagctcttaaaaaatcacagacactgtagatcacacaggtggataactgaaagaccaatgcagttttctaaaaggcacatgatatgaaaaaataagtggctagtactgcgctgaatattttaagtggtagaaagaacaaatattttaaaattaattattttatttattaacattctaaatgttgccctcatcctggtcctccctccctgagttcttcatcctattattccacccctttgcctctgagagggtgctccctttctcagcatcccccttccctagggcatcaaatctctacagggttaggcacatcctcttccactgaggtcagatagtgcagacttctgctatatatgtgccaggggcctcagaccagcctgtgtatgctgcctggttggtggctcagtctctgggagttcccagcagtccaagtaagttgacactgttggtcttcctatggggttgccatccccttcagtttcttcaatccttcccctaactcttccatagggatccccaacctcagtccaatggttggctgtaagtacctgcatctgtctcagtcagctgctggtagagcctctcagaggacagccatgcttggctcctgtctgcaagcacaacataacatcagtaatagtgtcagagtttggtgcctgtgcgtgggatggatcccaagttgggcctttcctcagtctctgcttttttttttgtccctgcatttcttttagacaggaacaatcctgggtcaaagattttgaaggtggattagtgaccccatttctctactaggaggggccctgtctatgtattggaggtggtcatttccggttccatgtccctactgttgtgcattttggctaagttcatccccattactttctgggatcctttcacatcccagatctctgggcctttctagaggttccatctatcccccaccccaagaagctgcatatttctactcattctcctagctttctgcacttctctcctgtctcaccagatatctgatcttgcccttcccaaccttctcccatcaaggcccctccctctcactgcctcccatgattattttgttccccagtctatgtgggactgaagcatccccacttgggccttccttcttgttaaactttttatggtttctgggttgaatcataggtattctgtactttttggctaatatccaattatctgtgtatatgccatacatgtccttttgggtctgggttaccttactcaagatgatattttctagctacatccatttgtctgcaaaatgcatcatgtcttcctttttaatagctgaatagtatcccattgtgtaaatgaaccacattttctgtatctgctcttcagttgagggacatctgggttgtttcgtttctggctattatgagtaaggctgctaggaatcgagtggagcacatgtccttgtggtaaaggtagagtatcttttgggtatatgcccagtagtagtattgctgggtcttcgggtagaactattttcaattttctgaggaactgccagattgatttccagagtggttgtactagtttgcaatcctaccagcaatggaggagtgttcctctttctctatatcctcatcagcatgtgctgtcacctgagttatggatcttagccattctgattggtgtaaggtagaatctcaggatcattgtgatttgtttttccctgatgactaaggatgttgaacatttctttaggtgcttcttggccatttgtgtttcctcagttgagaactctttgtttagctctgtacccattttttaaattaggttatttggtttttttggagtctaacttctttatatatctatacatatatctatacatatatatatatatatatatatatatatacatacatacacatatacacatacacatatatgtatatatatgatattaatcctatatttgatatagtattagtgaagatcttttcccaatctgtagactgccattttgttctattgacagatgtttttagtttcatgaggtcccatttatcaattgttgagcttagagcctgagcagtagaacagatttttttaattgtcaccacagaaaactcttatgcatatgcatctcccataccctaacttcacttctcaactcatgctggaaaaaggttctatgactcattatttaataccattcctgacaatagtagttccatgggaaatgatacatgtatgtatgaaaacataagtgagtaagtgaatggcttcatggtcatgggcaaatgttggtgtcaaagaaaagccttttgacatgatctgaggcccataccatttatcccagcactgaagaagaggcaggtggatctctgtaagtttgaggccagaccagttttcataatgagttctaggccaaccagggttatatagagaggacttctctttacagaaaagggaagttctttcaccagaatctacttcaagcactgttctaaagattgagtgggccatcactgttcaactcccaggacagactggtttgtacctgggagtttgtacaccatcacaacaccatcacccatcatgcatttctttggcctggctagtactcatgtactgatctgtgccccaagagtaaagatgaaatatctagggcatgaataccaatgatgtaggaacagctcatctgccatcttgaagttaagtcactttctgtaatagatgttatgtgttcatgttgatggagttttctctggccctgaagcttagatctgttcagtggcatatcttgaatatatagtatcttgagtaatgagctcgcttttcaggctagggtcagaaccattgacttcatcttgctcctatatcttgccctgtctagagagagagagagagagagagagagagagagagagagagaacttggttacctgctcttggaatcattcagaattccatccaacctcctccctttttccctgttatcatctccaagtcatcttgcctctctccacccagtttatttattccaaaggtcagagtggtatttgtgacattcacttttgattttcagcttgataaaattttttacattgcctagacagggaggccttagtgaggcacagcattgggtatgtctatgaggatcagagaagataactaaagagagaagacacaccctcacacaccctgaatgtgggttggcattcttaatagcgttctcacgcccggccaggaagaacacaacagaccagaatcttctgcggcaaaactttattgcttacatcttcaggagctaggagcgcaaacccccagccccaaaagcgaaagccaccccaatcttacatctttaggagccagagctccggcgcgccaaagcgcagagcgcgctctattgtttacatctttaggagcgagcgagcaggcgccagagccagagagagatgccagcgagagagaatggcggaaaacccgtccccttttttaggagcgttatatttcgcctaggacgcatcactccctgattggctgcagcccatggccgagctgacgttcacgggaaaggcagagtacaagtagtcgtaaaatacccttggcacatgcgcagattatttgtttaccacttagaacacaggatgtcagcgccatcttgtgacggcgaatgtgggggcggctcccaacatctcccccttttcttttaataagagcaaataggccacccatattaatgagagtggagatagaggtcaaatccccagtgtgtaggtaaaggagccgtacacataacctcctcccaggctcatcacccagaggggtcctggtctggtcccgtgttgtttttcctgggggaaggacacttgaacactcaaccttcttgaaagatgacatgtctccctagaataggctcattttatgccgcagagcccttctattgcagtgcttagccgtgcaactctctcgggctgctgaagcacactcactctatgcccgtgcaatgagactagcctcatgggatataagagctgagggccannnnnnnnnnnnnnnnnnnnnnnnnnnnnnnnnnnnnnnnnnnnnnnnnnnnnnnnnnnnnnnnnnnnnnnnnnnnnnnnnnnnnnnnnnnnnnnnnnnnnnnnnnnnnnnnnnnnnnnnnnnnnnnnnnnnnnnnnnnnnnnnnnnnnnnnnnnnnnnnnnnnnnnnnnnnnnnnnnnnnnnnnnnnnnnnnnnnnnnnnnnnnnnnnnnnnnnnnnnnnnnnnnnnnnnnnnnnnnnnnnnnnnnnnnnnnnnnnnnnnnnnnnnnnnnnnnnnnnnnnnnnnnnnnnnnnnnnnnnnnnnnnnnnnnnnnnnnnnnnnnnnnnnnnnnnnnnnnnnnnnnnnnnnnnnnnnnnnnnnnnnnncatgggtaaatggaaaggcaggagtgtggttgggggtaagggataggagaattggggaccagctaagtgctaatgttatgctaatttttgttcctttgtttcctaatccattaagatgtcaacatatagccacttactaccatgggcaggtcccacccccagttcatccttgcaaccaaggcctgtatgccttaaactgtgggccatttcctcctttaaaaggtttcctatcaggaacttgatcacaacacactttaggttcccccttcccaccccattcccctccacttcatcaattgctataaatttacagttgtcctggcaatcaggatgaagaaatgaaagacttagctcctttctttctagaagctgataacagagttcaggagacagacagatgtgcaaataagtaagagtcatacagagtgcaaacgcccaaaatggaaggttgtaccaaaggttgtctgggagtgctcactacagacagtcaaagaaggcatcatccaagagcaaataagaaaatagcacctggccagtggcataagcaagtaaaacactctatttacacagaagaacaaatgactaatatcagaccctctcccgagtacaatgtgagaacggagcaggaaagcatccagtgtctggagaggatggctagatgacacgaacatactttctccttggttttgtttacatgccatcctgcaaagaactgaaatgcaatttgtccaactgagtcctttgccttcaggtcttgtacctcagagatagctcatgagccttgaagcagtctcgtcaggaccctgtgctttaccacagtgaatgaatgtctcaaaagaaaaggatgagactgcagcaaataaaaaacagccttggaattcacagatttgggttcccatgtgcatctgatgttagctggacaggagacaatgatgaggtaggacctctcatctctcttggcctcagccttcatctgcagcatgatagatttccattacaggaataataattgaaaattcttcatccttagatatttagaatgcccaaagaagagcttgtgaaatttcagatttctagtccctacttccaaagactttgattcatttgtatggagtagagcacaagagtcacacttgaagtgaacacgttgtcagtttggatgcatgtgtttcctaaatggaagaaccaggagtctatgatataagacacgaagacgggagttaccattatattctgtctcacattcacaacgttttctttaatttaataagaagcctaatctttgacataaaactgcattcacagacattcctgcgtcatgggtgatcgatcattcagtggatcatagcgataattgcgtaaagggtgttctaaaatattttactcatcaaagccaaactaagaggtatctaaaagtgaaggtctgtgagggtattgactttatcgggctaagtcacatacatggttttggggaggggcttgcaagcatgctttgtgatatttcacagtgaagtgtgtcactctcagaagctttcatggagatttatgaccctgggagggctggctagttcagataatcgccaagggttccagaatgcttgtttaatccttttcaacttcatacttcagtgctctttgggaagattgaaactcccacaactgcatgggcagagtgaggaggcaagctttgtagcccttcattgtattgccagtcactatgtctcagactgtgtcgctgtcttctacagagtttatatgaataaggcttatccaagaagctggaatttgatctgtgacctgacaggtgattggactaagagaattccccgtggaaatgtgatttactagagaacatgggacaatccagttggttgctggagtggaaggcataccattttcagcatctgaataagcagttattttcctctatgccacatggcctgttgattcaccactgagtatgtttttgttgaggatatgctatgttttatgcaattttggggggcatgcttgcatgataattgagacagttgctgggaactaaccattagtccttcgtaagagcataaaacactcttacttgctgagccagatcttcatgcattttacttatattgttatgaagtcagtccatcccagtatttatcaagtaccagcgtattctacagaatccttgttgggttatctgtgtagagacaatttagagaggaaaggcatttggactagaggaataccatattccgataacaaatttagaaacttcatttgtgctattaaatacagaatgaagaagtggtacaggaaatagaagcccactgaggacttggggtaaataaatctgaaaaggttataaaaggaccaaggaagtggaagctagaggtctcaatatctgagtgagtgctaggacagagggagaagaaaaaaatggagaaagcaattgaagattttcctcaaacaactaggcttggataactgagtgtaccactcacaaaatgagattcccacagagagcagtctgaggaccagagggtagtttagcatttggccacaaagagcccacactcttgacctctagtaaacacaatgattttcggatcccatgacaggtaatcattgtttcttctagaaaaatgcctgtgtctctgacactaaatgagccatgttgcggaaggtttattgattgctataatttgatgccaggagacaacctcctgtttagtctctggggtgggggaaggcacttgaagacctgagaaagaacagatgacttcatttgtatggcttaatcagtatggaaaccgcaagttggtggtgtggcatttgctgccagcctggaagaagtcttgacatagtcaggcaacttgatgactgtgcccttctaagataagcccacttactcacttctcttgttcagttattgccaatgaaactaccataggtatttgagaattggaggattttcatgaaaggaaaaaaatcctaaaatcataggatccaatttcacaaaatgattcacacagaccagttttgcaaggaccatattcaagccaaaagtgaatatctaagaaagactgaccacctatccatcagatgatacaaaggaaactcaagtattccacttagattcataaaaaattgttgtagaccatattttatcacagctattgattttgacctctgcccaggtctaagtgtccataatgcttcactgatttgcttggaatacacatctcatttatcattgagaactataacattacacccttgaagtttaagactttgggaggcccagttaactgttgtggttttttttttttaattttttagggtagcaatcatagatgttcagatcggaatctctgggtctaattgagaataactgcctggggctttgtatagacttactccaggaactctctaaataattgaaaacaaagtctagggtgatccagtaatccttttccagaagggcatatgcacatagatgagcatttgtgtatggatgaacttgtgtgcatgtgtgtttgtatatgtgtagaggccaaaagtcaacccctgctgctgttcctcagaaactgcccattctatgttttgagaggaatcttatgtgtctgaagctcaccaagtaggcttgactgacaggtcagcaagccccagggagccaccaagggtctctccattgctaagatgagtgcacaccaccacatttggctgttttttttttccttatggaagtcaaattcaggtttgcatgattgccatgcaaatactttaccagcttaactatctccctagcccccaatattctttttaaagataatttatttgattatgtatttatttactgactgatatggtgttgtttcatcccatagccttcctatcttaattcacccattcatgggcaacttcactgaattatcatgctttctttgctagtgtgtctaagacagtttggaaagtcccagatgacatgaaaaaactaaaagtttacactcatttgttaaggctgaaatttctaccagttgttctttgtcaaaaagagtcaattctcatttagaggcagactctaaagaatatttccttatgagatagaaggatttgattccatgaaccagccaggaaggcaccccatctcttccatccagataaagtcaaacacatattcgtaagatggacatgaggagaacaagcttttgacagtgttaagtagggtcactgacctatctcatcaggctattacaccagtaattgaacttttcttctcattcaattcctattactggactcttggatagctttatttgtctttgaggatatggaacacatcttgtttgcccagaggtaaaagcccatccattcaccagtgggaatggccctccttgtaactggtcctctgataactactttgggaaaacaacaaaaagtatgggaactcaattagacagttccctggctgctataacattcgctatcttttcaaagatagatttgaaaaatggacccaccttttcatcaaaattccactctctgcatcaaggctaccatttgcaaaggaaaaatcaaattgaaatctattcacatatcctggcaatgcattttgaaaagtttacttcacaaagcatcaattttatgggaggttaataagtattaataacaagaaagaaggactgcagtcgggcatggtggtgcacgtatttaatcccagctcttggggtgggtgtgggggggggcagaaacaggcggatttctgagttcgaagccagcctagtctacaaagtgagtttcaggacagccagggatacacagagaaaccctgtctcgaaaaactcaaaaacctcaaaaaagaaaaggaaggaaggaaggaaggaaggaaggaaggaaggaaggaaggaaggaaggactgcatcttcaagtacatgtaggttgccttgggacagaagtcaacccatttgactctcgcaggaactcggagcgtttggcgtgtcagcgtgcaaagcacagtaattggatgagaagcaccatctgtcagcttaagcagctgctcatgctcagagaagctgtaggtacaggcatcgcatgcacgtgaagctgagggtgaccgtttcctccagttcctcattccagttcctcattccagttcctcatgctgttcattgtctatttgttttttctatggccagatcctaccaaagtacaatgggagtaattttcaagtttggagcataataatacacaatcttcccccacattatttagccaaggaacgtgtatgtgaatatttgcatttagatacaactggccatgagactgccttgtgaaaaagattttgagaaagaaattaattgtttgtttctttattcaatcaatgctatcgggtgtctgctatgtggcaaaaataatgacagagtattgggataggaaagtgaagagctctctttctttcaagaagaccaaataaatcaaggataaaaatctaatgtgtgctaggctggaaggtgcatttcagatggggtactgggaggttggaagagtttcaggaaagatactgaggtgttcataatagagttgattaggaaagctccatttgggataaagttgcagtgagtactggcctgtgaaagaatgataaaacttccgggcacagggaacggtaagtgtgtgctgtatgcaggaaggtgtgagcctcctatgcctgagaagctccatgatatcgatcgtgacccctgagacacccagaagatacaaatggaagtgtccctgagaccaactatcattaaacagaccacgattaaggttcagtataaaggggaacagaggatgtgaattgtataaagttaatacatgtttgtcaatacccttcatagagcaatgtgcacccattggatacaggacacacacagtaagagatccctagagctggtttcaagattgccagataaattccaactccttcaaaaatgttagctccacgaggcagcaactgtgtccatttcacctaccattttatgtatagcggctaattccgaatttttagatttttaagtacttaataatttaaagttttttgcttaaaaacataatctcatgtagatcagactcacctttaactcactgtagagctgaaaatgacttttaactcctcctcttcttacctttccttctgattaataacaaatatttgctgaatagtagagttgttagctagtcattgacatttatactcttcttgtggagaagacctcaaattcaatcacagaacagttggttgcccctataacagtcaggctactgttgacacaataggtacattttgcctactgtgttaatattatggttcatagaagtcatagccaagtaagaccattggttgatttactttgtcagcagcctgcatggaaccatccagcactaagaaaactagccagcaaagcagagtctttcagctgagtaccaacttaatttctctatattttgtatccaaagtgtgaggaatcttcagaattatggtcttatcagctagttcttgtgggcaaccaagaaatggcaagagcttgtattgtttggaggtcttcaaggttctccatagtcaacaattactacagaggtatcctgcatctggcaccaacgtgttttgttttgttttgtttttgtcttattttgttgttttttttttcttgtgacccattacttttaagactggcattgtctagtcttgtaggagatctgcctttgaactctcttttcttatattttattttattgttttactgaacagtgggattccaagagtcttatctatacccagttcatttcaattaactcccttgccccatccctttacacacatgccccatttctctccctgtttaaattttcatggatattttttgaagactctgtagactaaccatgggtcaagttctaggtgtctcactgatgataagtgatgaacaagccatggcttctctcatgatgaggcttaaaatccataggaaagagagatcattagctcagcaattataaaacagcatgatagattttctcatagagcatctttaaatgttataaaaatttttcagattcagtgaggcaaatattatcaatacacatcacctgtgtcacacctgtatttccttagtatttggtgacacagctgcccccacatttctttctcctttaacatccagtacctatatctaaatgggaggactagcctaaggctgccgagacagcctcactgcatggttgacctgaaatgcttagagaaacactttatcagtgattgacccacaccaggggcttaagtgtccaatcctgagttagaactagtagcttattcctataatcctagcacttgagtggctgaggcaggaggattgaggtaagtttatggccatcctgagctacagagtgagatcatgttttgttctcctccccagaaaacttcagttccaaggtatgagttctgttttcagacatacctgagagacagagtcaaaattcccttctcagggggctgcagttgggatataaagagaattaatgaatgaacgaaaataaaaataaacctcaaaaaaagaaatatttgtttgtgtcctcttctgctctgacctggttttccagtctcatctaagttgtttctagaaacacctttccgtgtgtcattttcatgggttatttcctggaggaccccatcacaagacaggcacttcaccaagtccagtactcagggaagacttctcagaagataaacctcggcagatgaacagtcactcgggtacattgaagtggtgcaaataagagtcttttggggataggtggctgacaatctggtattcctttggaaagacttcagttaggtatacatgacctccaacttccatcttatcagtccatttttgacaaatgttatggcgagcccacgtttctttcaggctgtatcttagtgctatgaaatccatattgcttcacgatcagcacttatcaagattaaagaaaaacaaactccatttatttttcctttattgacagattcatggcctacatccctgtgaataaatgagctggcaagaaggggaatgggacagccagtaagcttggtgacataaattacccttgatagggaaggctgatgtgggcatgtcatcaaattaatagctgaatgctaaggaccattacatttagcactgtttgccatatccttctatataataatgcctgagaataatgtgtaattaactctgtggctgactgacaaggccaaatgcagggcaatcaatcatattgtataaacacacgtccctgagtacacatgggaggcaaagggtgacttaaaatgtctcagcactttctgcctagattatggctctgagcttttgtgaggccagcagtcatagagactcttatctatagatctaagctgcctacagcatcttggtatatagtcttccttgctatttatcttgaccttttacttgtgttctttgagggggtgacaaaaaagagatccccagtttccctttgtcttgagtggctttcaatggaggtgttcacaatgcataagcttttcctgcagccaccagcccctgtgtcactcactattctttctgcagattgctttgagcattagctgtttagaatctctgtgacagcttccactcctctgactatgtgtataatgcttctctagtaactgatgaggaatgataaatgcttcttaatgatcttcaccatgagcaagtgtggatgagaccgattcggacctttcctcttatgggttgttttctaaaatttacagtggcccagaagaatcatctgctctgcccaggatagttacttatagcttcagaatcttccaaggtctgtgtggtaacaaggaaggtcaagacaatagctacaattcatttgagagagaaaattattttaaaaaaatatttccagccgggcgtggtggcgcatgcctttaatcccagcactcaggaggcacaagcaggcggatttctgagtttgaggccagcctggtctacagagtgagttccaggacagccagagctatacagagaaaccctgtctcaaaaaaccaaaaaaaaaaaaattcctttattagtgtgaaatttttctatgaggctactatgcaatattctcatattcagacccatttgtttaggagtgtgtgtgtgtgtgtgtgtgtgtgtgtgtgtgtgcattctttgaagtgaggaagaattattttatttatccatcatggaagagaaaccaagtcctcagagctatgacagtggctgtgcatctctctctctctctctctctctctctctctctctctctctctctccatctcagaactagatttagctacagtgtaaaataccttgtaaaagtattgccaccctccccttctgcccccctcttcctgcctattctcttatcttctccccctgaagatgctaccaatcaaacagaccctttcctcaataatgaatcaattgtccacctccttgattcagagtcctagtcagacattatctatcagtcagagttgtagtaaaagataaagcagcaactaagcatgtgtgcatgccacagacacactgctagtacgatgggtgctaggagggaagagctacctgcatggcatcaccttagacactggtgcagaactgcaaagatagagaatgagcctctctgtgaatcagatcattttaactttgtgctactcttgggttaatttcatctttgttctctctgatggtttagaggtttggctttccatgtccagtctttttatagccagccaggtcacaaagtaccagcagagttgacacttgggttagctgggttgctatggaaatgaaacacacctgaggctactaattagcatctctaggtcccacagttcagccactttctctcattccgagatccttcctcctgctgacaggttagtcaccttgggtgttctttactcaagatggcagctttccttttatttacattgccaagaggttggggatttagctcagtgatagagtgcttggctagcaagtgcaaggccctgggtttgatcctcagctctggagaaaagaaaagaaaaaaagaatatgtaatgggacatcaagaaactactttctttacaaaattgccctgctgactggctctcttcctctagcctcctgccccatttttcaaagtcatgcattttgtgtatcaagttcttctagttttatagattactaaagccagatgattaggaagcaaataccaaggtgatgtaagaccaccaccacccccagactccacatctcagttgcctcggggtaagttcctaagaagcttagagatcttcccgccttcctgttctgtctttaactagaagcatagctttaaaaaaaagttttgatatatgggctttctgagtaaaccaagctggtcttgaactcaaaattctcctgcttaaatcccaattactagattatagtcatataccatcctgcctatctagaagtgttattgcttttagggtgttctcggggtctgggtgagatggcttacttctgtatttatagctcttggaaacctgaggtaggatgatcatgaaattgaggccacccaaactacatggtgaattccagaccagtccagggaaagggggaaaaatgttctctggatctttgatctcttgaagggagaaaactgcaaagcatgggcctttcatagtgttgtgcatatttgcaaagtcacttctatgggctgggatgtgctctgagcattgctttgattgctttgacatgtgactcacaaaggaatttgtaggtaaccctgcatagctgcattgggagaatatattataatttgcaatgtaacctcgttcacctgaaagatttgagaacacaatcattgctaaacagattaccactctcctctgggtctctcttgtcatgtacaagtcatttgcttggcaggttctttgtaccctgagaattgagtttctgagtcagcactctgtgaaatgtttcttaaagctccaagcatcatcacagccaaagtcacaatggcacactaagatttatctttaaccagagatctaactaccagcaaatcatctgtgaataacaaaataaaaccaatttcaggtgttaaagagatacgtgcacccatatgtttattgtagctttacctacagtcaccaagatatggaagcgacctagaagtccatcaaagatagatgataaagaaaacacactatacactgttctggtttagatcttaggtgtatccccctgccaaagatcatgcgttgaaggcttagtactcagatgctggtgtctttgggagttagtaggtgagaccccattgaaggaaggaaggacgttacagagggcaaatgcttgtgaagaggatgttaggaccccagctccttcctctttttctttcatttctttgcttcccagatagcttgtaatgagtcacttcactacccctccccgcatgcttctgctgcaatgtactaccttcccacaggtgtaacggccaagcaaccatggactgaagccatgaatccaaatctttttctgaggtcatttgacatgatgtcatcaaagataactgatgccaggtgacaaaaggacccttcagtgaaatttttcttattttcaatttataaatgatagctcctcaggtgttcctcttgttaacagttacttatactcaaaatattatttttcttgatgcagtaatattgtgaatagagctcaagcctccagtttattatacaagcttgggctacttggaaatatacgaaaagttctcagtggtataacacacagtcgcagaaacataatactacctcagtagtaactactagctaaacaaaatacaatcttggaagtatgtagttattctgtcccacagataatccttagaattgatatagctactaaactttgttagattttattgttaatttggtaggccatgttctcctggtatcctccatctcttctggttcctatactgtctctcctgcccctcttccagaatgggcccacagagactgaaagagcaagtttagggcctgcatgggtctgccccaggtcctctgcatatacatcacagctattattagcttgatggttttgtgggactcctaatagtgggagctggtgtttctctgagtctttggctggcacttgacattctttccctcttattgggttgcctcgtccagccttaataggagggtttttgccttgtctggtggcatcttgctttgtcctgtttgggtgttgtgtcttggaggcctgtcctttttggaagatgaaatggagggggtatgactctgggggagagggaatgtgaagagcactgggaggggaaactgtggttcggatgtattgtatgaaagaataaagtattctcagtaaaagttaaaattttaataaagatttttctgtcttttaacacattaggaactccaactactaaaacccgttcaccaaaaaaaaaaaaaaaagtaaaataatataggatgaattataaaagaaagaaatggtctataaaggagctcttgaaacctttgcttaagtattttgaaggtagaattcgttttcattgactgtagtttttctgcttggagagcagttggagttgtactggcctctcagaccttgctagggcattagctctacacctttgactggacagttggagcttccaaacatctgtcaagcccacagctccatttcaaagggatcccttttggaaattcaccattggtgtctcatgcccgtgcttccttgagaacagataaaaggacagggcatggctaagtttgcccacacaagacctccatgagatcaagcctatcagaattgcagcatatatagaagcagagatttctgagtccccattccaagtagagaatctattggcagttgatggccaatgagagaaagagtaaattttcttttatctttgcaggtgctgtccctggtaggttgcacatgctgtaatgaataattccttatccatgcacatgtggtcagaactaactggatttagggaggatgatggtggtggtggtggtatgatgatgatgatgatggttattattttttaaacctcatgaagttaaaatagtgatagtctagaagctccaaggaaaagttatagagaagtactaagtaatgcatatgatcaaaatacattgcatacatgtataaaattttcaaggaataaatacatatcgaattttatttaaaaaaataagaagttgatagtttacattaggatagccaagctgagggttggccaagaggctatggagtgccttgaaatataatattagtcatcatagatagcagagaatagataatatttgggaaaatcagaacttgatgcagaagaaacaaggtaattagttataatacaggaactaatgatcacaaggtaactagctgagttagcataatagcagaagaggagaataactgtgagtcgttcctacttgggagattcaccggatgacccatttgctagggaactgaattttaaatggttcacagtcttaagtacttcatacgttccactaatacttgacctatccaactgttcctggaacccaggcagtgtggcaacattttttcctaggctattttttcccataaacctcccaagctaaagataacccaaattcattggaatcaaaatagcagaaccaatataaaccccccccaggagagaccccagcagcagatcaacagatctagcaagtgatggattgagcttacaatctttcttctcccatcttcacctcagatctctaggctcaggttttctattggcagagttgagattgtgtctctgctggcccttctaccatctcattacggatgggtcagtcaggtaaaatctgcacagctttgacttcatcagaactaaaatgcaaggaattaaggagcagagagagcataaaagagaaaggagagtgggagtctagaagattagcccttcccgcaaagcctttgctgagctacattaataaataattagcctggccaacttctgcaaggctttgcccaattatttgggcctaccaggcatagggagggctactgagatgctgccaacacattcaactataacacaggccagagaggacaaggtatttaacacatcctgttctcataggaactgggcactattcatatgagtgccctaacgattctggtattctttgatttattaaatgacaactgtgccttgcctgaagttggtcataaaatttttaatatcttagtctcaatttgtgattcatttcacttaggctaacaccacaaaagaagagcagtgccccttctcttagctctgacacatcttacaaacttcttttgtggggtcatttataatcattccagtgctgacacatatcctgtctcattttgatgagacaacaactctgtctgaactgcccaggcagatgggtagaagtgttggctttccatgaagctaaagcccagagaggtgatgctaatttttgcaaacccccagctattcttgattgttttctgatttgttgctcttttgtttattttatttttctattgatgtgaatgggttcctctctcaggaagtgaacacttaagcaagaaggggttgacaaatgcttgttcctattccacaagtcacctcttagttcagtttattgttccctttgccatacaggtttttactttgttgtatttctgtctgtccacctttgctttcattgctgtacacttggtgtcatacccaagaagtcatagtcgagaccaatgtcataaaactttccctctgttttcttcctggggtgcaggatttcaggtctcatgtttaagtccttgatccaaaacttggcttctgttcttgcataaaataagggtccatattcattctccaacactgaggtataagctctgatcagtaggatatgcttacaacaatgaatggcgtgtactgactgttttatgctttaaaaaaaaactttttattaattatttgtgacgttcacatcatataccccaatccctctcatttccctatcacttcatagttcccctctgttctcgcaacctactttcaaaaggaaaacaaaaagtctcattaaggaagctgtagagtgtcgaagtgtgtcacacagtacacccttttgtccaaacaccattacttgcaaatgctcattgcaagatgccattggtctgctttgaggcctccagcttctgctacactctcaatactggatcctcaccaggactcctctcagatatcctgttattgccctgagttagcccaccccaacatctattccacccactaactcctggagcatgtgacgggtccatcctacagatccaacgctgcatggtctccatgacactgtgcagaaacagaatatccactctctatttttttaaccatgaaaactttgtgacttgcacagaattcatgaaactagtgaggttctagaaggactgagtttgaatccctgacatactgaatagatttgttgaagccatgtctagatcattgtgattgttagctttgtcaatttgacaaaaagcctagactcacttgagaactagtcttctgggcatctctgtggggttattatgattgtgttaactgggatgggaagacccacttctacaacccctgcctggggtcctggtctgtacacgtgaagaaagggacctaggcagcaacattcatcctcagtagactatttcctggtcatgggtgtgatgtaactagttgcttcaaacagttcctcctgcaggacttcccaccttgaactatgagacagaagaaaccttttctcccttaagttgcttttctcagagtattttatcacagcaacaggaaaagaaactaatccaatcatcaatttccttgctgtaagaagaatattgatcgatcagaccatctgcaaaagcttacagtttcaggttctatccccaagccctttgggagctgtgagaacttaccagcttgcagagagttttgcaaagctgggctctcctagatgtgtcaaggcctcctcacagagtcacaccaaggcatctcactctctcagtattcttccctgaggagggttgatttgtttgcttttcactgagatgtnnnnnnnnnnnnnnnnnnnntcaaacccccagtgtgcaggtaaaggagccatgtacaggattagctcttaggctcacaggcttttacccagagcaaccctgacctgctcccgtgtcgtttttcctggggagaaggacacttggacactcaaccttcttgaaagatgacatgtctccctagaataggctcatatatgccgcagagcccttctactgcagtgcttagccgtgcaactctctcgggctgctgaagcacactcactctatcccgtgcaatgagactagcctcgtggggtgcaagagctgaatggccagcgacctattgcttaagcatagataaccatatatcaggggaagcaccatgttctagagctgcaagcgcctgggcaataaccaccttgtctctcctagtttgggccttaagcttacagaccaaccagagaagcaacactaatccacagcaaagtgtatctccaaataatatcaatcccacccattctttaaagaaggaaaatgctgaggagatccaattgggtaattctttgatcagggacaggtccaagcgcgtggagttgacctgaatgatggcaagtctcaattcccgaagggtctgttcaaattcagccgtccaattctgtaacatatactgagaaagactttttaacaaattagctgccctagtaaatttttcatactgaatggaagtaacgcataatgagaggtcccccaagctcccgacaaaccctgagccagtcttgtaaacctttgttctttcttggggctatggccgctctgcattcctgtgtggcttgctcataaataagctattctaccagaggtgcggcttgctctgaatctccaaaaatacgctctgctgcctctgtcattctggccacaaaatctgagaatgactcctgaggtctctggacgatctttgttagttgtccagtggcttcacctgcttgggagagcgccttccaggccctaatagccttttcatctgattcagaactattaagaactggctccttgagctcatctagtgatgagtatctcctagagacctccgctaattgatcttttttcttttcttttttcttttccttccttctaatctctccccaggtattcttacctgacctaaacttttcctcaggttcaagacctgtggaaaggcctgtatacttattttgtgtaccatatttcctctttgctcctactctctctccccgctttacttctgatagattgccctgaatttcatccagaattttcagccctgccttaaccgcttgataacatgtgaaaaggaacaaaaaggctcctaacactagagaaagttcaaggccaaacataccttgtaaagctatttcccactttacttctgatagactgtcttgaatttcgttagaaagttcaaggacagacttaccttgtaaagctattccccactttacttctgatagactgtcttgaatttcgttagaaagttcaaggccagacttaccttgtaaagctatacttacgggtacctgttccccagctgaagagttctgaattcacgcagttgaatccttctcaacagtctgttttacgggaacacttcattaccaccgttccccagctgaagagttctgaattcatgcagttaaatccttctcaacagtctgttttacgggaaccttcattaccgtgacccgcagttctggttccggaatgagggatcttccttgcgccggtgatggtaaccgtcccaggttttctcgtcccgggttttctcgtcccaggtcttctcgtcccgtcccgggtctcagcaccaactcttacacacgttcacgcgaccggccaggaaggacacagcaaaccggaatcttctgcggcaaaagctttattgcttacatcttcaggagcaagagagaaagagagcaagagccagagcaagagagagaaaaagaacaagaacaagaaagcaagagagagaaagcaagaaaaagaacaagaacaagaaagcaaaagagagaacaagaaagcaagagagagaaaaagaacaagaacaagaaagcaagaaaaagaacaagagcaagagaaaaaaagaacaagagagagaaaaagaatggcaaaaccccgtcccttttaaggagaattatcctccgcctaggacgtattactccctgattggctgcagcccatcggcccagttgtcatcacgagaaaggcagaacacatggcgggaaaactgcccctgcacgtgtgcagattatgtttactacttagaacacagctgtcagcgccatcttgtaatggcaaatgtgagggcggctcctcacaacagaagaaaccttttctcccttaagttgcttttctcagagtattttatcacagcaatgggaaaagaaactaatccaatcatcaatttccttgctgtaagaagaatattgatcgatcagaccatctgcaaaagcttacagtttcaggttctatccccaagccctttgggagctgtgagaactttccagcttgcagagagttttgcaaagctgggctctcccagatgtgtcaaggcctcctcacagagtcacaccaaggcatctcactctctcagtattcttccctgaggagggttgatttgtttgcttttcactgagatgtacctcctcagctgcatcagagctctgaggcagcaagtgacagactactttatctgtatgcctcagtgcctttgatcttttgggaccctttctgagagtgtttaagacaaaatttcacaactgccacaaataagagacgcctgctaccttaagaagcagggctaagccgggtgatggtagttcacacttttaatcatagcactcaggagacagaggctggccgatctctgcatttgaagtcagcctggtctacagagtgagttccaggacagcccgagctatacagagaatctcagctgcagatcacaatctgtcaggaagaaaactgagcaggaaggaaactagaactctggcaggcatgaaagtgggagctatggaggaatgctgctttctagcttgctccctccccaaggctctcagcctgcttttctgtacgacctagcttttcagccaaaagaagcaaagctgcccattgagtttattttgcaccctgcaactagaactaatgttgccatgcccaaaacacacacatacacacacacacacacacacacacacacacacacacacacacgcacacacttctatttggatatttatagcaatgaagcagaatccctgtgaacatattatttgggctttgagaaaatgtaattcttagtaagtattgtttactgcctccttttcaaacttctggtttgtatatatatatatatatatatatatatatttggagttacaatcaatagcaagtcgttgtcttatgtccatgccataagtggtcctcagcagactgtacagtaatctcagaggtggggcgtggtgaagctttgttttctatgtgcatgtgtctatgtccatcaaatatcatcagggagttgtgctgtgaagccttcagttagggcctcgggtcaacacaatagctaccatgctattggtcaccgaggcacagacagaggttagccgtataaacacatcctagtccttcatgattccttccatcagtgctcagagcatttccctgtactctaatgcctagcaagggtcctatggccacccccaaactgaaagggacagagaaatgtagccttagtctgtaatgggaacaaaaaccaggcagagtcaaagcaccataggcaaacttgataaatgggaggctcatgggttttttttcttaattcagaccattttcaaggctccctgggatcacaatttacttttagcatttgtcagccaagggaacggggagaccaaaacgttagtggaaattaagaaatgagttttagcaaaattttccttcttgttgtggggttctcgttttggttgtggtggtggtttttgttgtgaagcgaaattggggtttatttaaaaatagagaggaaacatacttaaagaaagaataaagcacacagagagcatgagtgtgggcatatcaaagaatagccacactcaactatctctaatagtcatgtatagaattcggatgacttgtaaatgttactattttattggcattattaattattaataattatgggttttattataatattttgcctgcacataatatgtttcaaccataaagtctaagtaaaagaaactgaggacctgggaaaatggctgagccaataaagtgcttgcctgccatgtgagcacgaagatccaagtttgattccccagcatccatgtttaaaaatctaggtgcaataatgtgtgtttataatcccaggactagcaaggctgaacaggaggattgctggggtttgctggccagcaagtctaactagattggcaatccctaagttccattagagatcgtccatcaattaaagtagaaagtagaggaagacaccnnnnnnnnnnnnnnnnnnnncacacactcacacacacacacagagacacacacacacacacagagacacacacagagacacacacacaggcacacacacagacagacacacacacagacacacacacactcagacacacacacactcacagagacacacacacacagacatacagacactcgcgcgcacacacacacagagagacacacacacacagacatacacacacacacactcacacacacagacatacacacactcacacacacacacacttctatgtaacacatacatagacatgtatactcaaaaacaaacactcgatactacacataaagaatgagaatccttatcactacaatatttcatgacctcgacagtgcttgtgtggtgtcagctactcaaactcagctaccagccccacctccccactcctgattaccactcaactctcagtcactgctgtaggacatctcattctgctttctagtctgtttccagaacatgaatatgatgctctttattctgcaagtaaccatcagcacgaatgctgctgtgggtaccacactgacagcagtcccagggttaacaggagacaagacgttgtgaggggcaccagggaatccgacgtcattgcttccagtggtttttgtttgtttttgttttgttttgtttagcttgcctcctccctcctcatttgctggatctgtatgttagtcgatattcagtcactctgacaaaattacctgagataatcaagtaaataagaggaaagatttgtttgtgcttacaggtttggaatctggagtacatggtcaataggcccatgaacatcctggtgacagcatatgaccaaggagacctgctcatctcaaggtggctaggaaacagagaaaaaggagcgtctgaggtcttgtgcttcttcaaatgaaaagtgtctcctataggctcccatatttgaatacttggcccctggttggtgacaatgtttggaaaggttgttgatcctttagaaagtggagtcttgtcagaggaagtatgtcacagaggaaggctttaaaactatatagtcttgtcacagttccagtttactctgttgcttgtgatcactcagcttcctgctccaacaaccatgccaatttgctgccatgtctcctcaccattagagattctccctctggagctatgagctaaagtctttcacaggtcaattttggccatgctgttttatcaaagcaatgaaaataactaatacagatctgacaatctacgttcagagcacacattagtcacctaactttcttctcctgaaagttccaccatgttctaataatgtcagaggatagaggccaagcttgggtcttcaatgcctgggtctctgaagaacattcaagagctaaggcatagcagttcagtctcagccttttgatggaaactgtccaaattgttctcagtccttaaccctgcttatcaactaggagtttccttattgtttcaagcaaagtacttccctttgtcctcacctcttccatcctgggctgtgctgatggatgcattctttattcactggtagtaatattattgttttctaagcaaaaggcttatctaacaaattttccatgctcaaggtgagaaaaactgagaaattagattgtttttcaagatgcctcaaacagaaaaataagtcttagggaaacaagtgttttatacagtcccaccaaccttactttttattagtaaagaaagtttttaaaaatattctaagcatggattataaagtgtaaatttggggagactgatggtgatcagattgtgaaagatcttggaagacctattaatactcacttttattcaaatcaagtaattagcataattaatggatcataaacttaggggaatacaagggaggctaggaagccagctgggtggctattgtagttagtggttaagaagaaatagagaagggaagagaagagaagagaagagaagagaagagaannnnnnnnnnnnnnnnnnnnnnnnnnnnnnnnnnnnnnnnnnnnnnnnnnnnnnnnnnnnnnnnnnnnnnnnnnnnnnnnnnnnnnnnnnnnnnnnnnnnnnnnnnnnnnnnnnnnnnnnnnnnnnnnnnnnnnnnnnnnnnnnnnnnnnnnnnnnntgaagttgagcaatgtagagcagacagcatggagatgacccatgtgtggtgtgtgtggtatgtggtggtaaggacaaatattgtgaatggtgcccatttccaatttgtagtagctacatggatgtgggtgcaatttattgtaataaaaattaaatgagtaaggatgtatctgggggtgggacacatttctttgtatatgtgtaaggagccccacctgatccaagaatgggtctgcaattgagcatcttagacagactggacagtagaaatctgaagcctgggggaagatagagatacctttaggacactgcttttctagaaggtacctccaagtaactctttctcttgaccttgtgtggtgctccctcggcttcaaatgtaaacgtgaccatggaataacattcactctaggggaaaaaaaaatcagaaccttcctctttacctagttatggacccaatcagagggcttgttgctgatttaatctagtcactgtaggaattgtttccaggacacccagaatctcacctaaacagcagtagatgaatctctctggttagacatagacagccgcagctgagtgatggatgtggaatattgttcaccgtcatccatccatttctcctgcatgtaccatgaaagctttcactttttaaccttttcatttggttttgttggcattgtacttttatcatcaagaaaatagaaaaaaataagactaatatcactcaatcaaaatcactagcaggctactgttctggaaactgcaaattctcgaactcagacatcttccagctataaacctgatactgtctgtggtttgttttttgttttgttttgttttgttttgtttttgatttttgtttttgtttttatcagagctggggagaaaaggcatttgaatctcagcaggacagctaccttcatgactcaggctgtcattcactaggtgtcccttccagagagtcatcccttccttctctgggacttactcgtttcttctgagaacacggataaattatcacagtgactgatgtgtcacagggctgtctggaggttgtggccaacgtagccaaagaaaaagctctggactccaaagggatattacgtcaccacattgagcttttgttccagaccaagcatctgtcacatactcttcctcattaagtcctcattgctggaagctgctgggataagagtcttggaaaagaatcatccttttgtcttgcagtgcatagtgtgggactgggactccaacggcaagcatgacttcatcggagagttcacctccaccttcaaggagatgagaggagccatggaagggaaacaggtaggtggttttgccccagacactgtctaggattcacctttagctaaaagtggaaaggctaacagcaagtcttccatatatgaatgagcccgataaaaagggaagatggtgggatttgattctagaaccttcccaacccaaagccattctgcaaccctgaaatagcaattcctccatggggaaaccagagtggttcaatgagtgtaggtctaatttcctttagctatgcagtcttgggcattgctttcccaagggccacaattaaagtcaactctaaattataagccatcactccttgaataataagggacacagcgagagaaactgctgctgcattaaatgtacagagccaggccctatcgagctaataagtcaatgccagcttaccaatgccaccctctgtagttgtaaagtgtctcataaagttgtatcttgccctcctctataaacagaaataggcaaatcaataaatattgaaaacattgcatctttgggttcccgagatgccattaaaagtaagattataacatatatcatcattgaagaccaccatggctagatgcttccagataaacaaagataaatctgcaattcccattgaggccatgaagtgcaggccactgtactttctgtatctgtgagatgctagtaaaatttagttccacatcaagactccatgctgacacatttatttgttgggaacgattctcctcttcggtgatttttacaacatccagtgtgcttggctttagatgcacaatggccaatcctgccaacattgtctctgttctcctaaagctaacagactgatgggagtcaaagtatgatctaaacatgaacgaagtaaacaaaaattaaaaggcaattacaacttgtgacaaatgttatttaaaaaggaaagataggactgcaaagatgacgcctctgattaaggtattgctgccaagcctggaggcctgagtttgatccctgagatccaaagaagtaggaggagaaaaacaactcctgtaagtcgtcctcttattttcccacatatgcatggatcattttcatgtgcacacacacacacatatacatgcacacacatgcatacacacacacctgcattcacaagtgcatgcacttatgcatatatgcacacatacacacatatgtactcagataaataaatgtaagtttctgaaatataggatagaaaccctccaattagggagtggattacaagttattagctggaaaggtcacatttaacgtcagaccctttaaggatgagagaaggcaaatctggcagtgagtaagggaaaaacatttcaggcagagagaacattcttaggtactgatgcaggaacgagctggtgtgctggagtacttggaaagggaccactatatcgggtgcagagagtgtggggtgaccttgcatgggaagcaatcaaagacagagcagaggtcaggaagaactgactctaatacagtcctccaaatgttaggaagacataattaaactgtgctctccaaaactatggtggccaccagccacgtgtgactatattttgattagttaaaattagattaagaaacactgttagatccatctaatgaagctggtggctgtggtattggatgacaagggcacagagtatcccaaccactgtagaaagcttcattggctgatgctgaaaaggatcaacctgattcaaatttgctaaaaggttgtgtcagtggcttggggcaatagctcagttgataaagtgcttgctgtataagcacaaagacctgtgtttgatccccagagcccgtgttaaaaagccaggcacggtggtatgctcctgcactagggaaaagaaactaggagggtagctggggcttgtgggatggccagcctggcctacctagagaaatccatgtcagtaaatgtctaatctcaaaagaatgggatggattgctcctgaggaccaatacctgaaggggatctatggcctgcacatacatgtacatgtgtgttcatgtacaagtatacacacacacacatacgcacacatgtatattcagagaatgctttggctaccgtgtaagtatcatttaaagagagaggaggaagaagcaggtcaatcagatgagtgagaggataggaaccttgaacctgaggaccctagtatacctatatcagagggaaaaagaggagacccatcgttaatctccctttccctgcctgggtcatgatgctgacagaatgcagtgatttaactaatcattaattcttgaccacccccataaatagctttagattgaaactgatcagtgggaaatttttataataccaaataggagggccctctccaacaccctcctggaaggaatcaatgtggtcggaagatctggagtggtcctgatgtgtgaggcttacagtgactagggaagtggttcagtcactgatggactctgtgagacactactgtgatctcttgctgagtaatgagttgcccactaacttcctgcccccaaacagtcatcattccttgacattttcttggttgtcaatttcatcttgttcacccaggatagctcctctctgcctattatggagccgtggaacgctcacactttcgtgcctaagcagcagagatggctagtgcatctctgtggtagtggtggtggttttatcctctaatgtataattttttttcacaaggtggtaaaataaaacttagaagcaagaaaaggcaacttcagaacactggttttccccagcttctgttctcaccacatgtttaatgaccttttggccaaaacaagtcacatgactaatacatgggcaccaaggtcattggaggccattgtgtcagtttatcctgctcacatctgcctccaaagctgctttttcaggcattttttgaatgtcaggaataaagttaggtctcctgagcagaagcctaaggtcccagctccttcaggatcagtaacagaaatgtccagtgaccgctgggtgcttgccttgcagttgcttctacctgtgagtcaattgtctatagtctagaagagatggaaactgttttagctactaccagttaatccatcagttctcagtgtctcccaaggcttttatcctgtccttcaaagagtatcttctggaatgagtgccaaggaaagggctgagaactgaggaatcataaggtcagctttagagatgagaaatccaaggcatagaggagtctagcagcccatcaaaggacacaaagcggggcaatgaaggcataagaatatccactaggcagtccattgtctgtcaatcacttccccttgtcattttcatggataccaacggtaccacctagagaccattttccaaccatccagatccatgtgtatgtccccaaaagcatgtaggatcttggcctcattcgatgacttgactttcttttgaagatgctcattttgacccttttggtgtaggtacagtgggaatgcatcaaccccaagtacaaagccaagaagaaaaattacaagaactcaggcatggtgattctaaaccagtgcaaggtaggtataatcccctctccaccaggagcataatgctaaacttgccttgtgggagaatttcaagtcatgtgatcaaaggggaagtgtttccacaagggagtgaccttctcaaagaaaagaaaatccacaaaatcaatatagtgctggacagaggaaatcaaatatgattgtgagtggcctaaaagctgtgacagcccaatgtcaccttccccttcccagggacagtcttgccctgaaaggcaagtgcaggtcatagctcaggctcttctgtgcacagggcagatctagaggaagatgctcaagtggtgtgggtgaagagactaagtatgagatattccttactctaaagtagtaatgactcttgaaaataaggtttgggtcttctccaaagggcagatgatgtcaattaaagcaatacatagactgaaataaagtggagcaaggggtgagaatctgcagatatcttgggcccatctgtattgatgttgaagactcaccacagatttctttctaccctttgtcttggcttaccagcctgtctctgaagtgcaggccttcaatctgtagggaaagcagagcatagtgttattaatccaggccctctttcatgcagatccacaagatgcattccttcttggactacatcatgggcggctgtcaaatccagtttacagtaagctgcttttgtgtttatcctttttggagcaatgaggggtgggaatggtattgggtttgtgaacatgcagatacaaaagatcctaaaagtcttgagcttttaagaactatggctaaaatattgtgtgggcccctgtttcttaaatgagtccatattccatctccttctggtgagtatgatccttgctcctcagcctcggagggtttagaaatccctcctaggatttttcccttttttaagtacctacatgtgacatgaggtgcaaggcaggctatagatttccagatcccatagctgggcaagaaggatgaaaaatgagccacgctgctctattccactgaactcagacagatgccttaattgtgcacatataaccagaacccaggcatccatgccatatccaataatcagtaccaaaggagtgctgtccaaatgctttctcaggcaatgagagtgtgcatacacacacacacacacacacacacacacacacacacacacacacacaaattgtgtctatccactctggggtaacttgtgttcactcagtcaatattcaaaatgttctgagatataggcagatttaactttcagaaagaacatacccacataacaaaatgtaggtgtgctggaaacaaaagaaaacgctatagattatagtacagaaaaggtggaatttgtacaatgcttacctctcatcttacaaaactatatttgtgaagctcagtcctctttagttcactctaccaaatcatccatgtgagaaaagcatgaaaaatgagtttaggttttgtatatgtttgagtccaacacaattgacaaaatccatgcgttcccagaaccaaggataatgctggtctcagaactagaaaggagaatcaagataaatggacatttaatggtccagtgtgtcattagcaaaagacttgtgtggtgatttgaatgaaaatggcccccatagtctcataggaagtggcataattagaaaagattagaacacgagtcctggttggagtatgtgtgccttgttggtggaagtgtgtcactggggatggtctttgaggtttcagaagttcaagccaggccaacagtcactctctctcttccttatgtctgctgatccagatgcagagctcttggctcctttccagcaccgtgtctcctacatggtgtcacacttcccaccatgatactaatggtctaagtctctgaactgtaagccagccccaactaaacgttttcctttataggagttgctgtggtcatgatgtctcctcacatgtaaagaacactaagataacttgttctaatgtaaagaaaagtcaacctatgttctgtctcaactcagcattgctcaccttacttttgaatacttacatcacttccttaaagtctaagattctacagtgacggagccacctgccctcctacacacacactggtacataaagaacacaaccagagcaagtcctgtgggcacacccatccaacactacctgtgtagcacacttattgctgatccaagtctatctgcagggcagtagcaaaacaagaagttttccaaggagagctactgaaatagtttcccaagataataggcaaaggagtgatgtcaagaagctatttataggttttcaagggaaagctctattgatttcggtttgttttggattctgtagatcctaggctcttgaacaactccttattcaaccttcacaggcttgctttgcccttggggctgtgctggatagcctcagccacccccacagcattcccagaccacatcctgactgattgttacttctttgagaatttcatataatgtgttttgattatatttaccctccttccttagttccctccaagattcaacccatttctcttcccattcacctttgagtgtccccctgaaatttcccataaaggccaatttgtgctacccagttcttcggaatgtgtgactttccaccagttggctcacaggatatgtactcttggatattcctgtagctgcttgactttgaaaggttgcttttcctgctctgttttcctcaattttctcttcttactaaccctccccaactgagtagaggctacctcaaaatttgccaccagcagcaccccaagtcctagctctctccatgttcatccccaccctcgtctcctccagtgccaactaatagtagacttgtgtgaggatctcagtcaggagcaataggaaggagaatgtaaaataatgctgagaaggggcagggccattgagggttccatcacaagccccttcctcctaaagatctcaggttagatactcaaaggataataagagttctggatgctctgtccaagaaaatgccccagtctcttatgccagtggcatttacttccaaaatgaagtcagctttctcattatgaagttcttgctgcttaaatagtacaatgttatgcaaattttaagctctagtacagttaattaaaaatagtgtgtggtttaattctgcctactagtgcttatgtaccacccagtaacttttttgcagcatggaaatgagtggcagagagtggagatatgggggtgggatgtgggcctccctggcatggagagggcagggaagagagaaggaggaggaaagtcattagaacctgtgcaccacccagaggcaaagattctcactggttcacgaagctgtgcatggctgctgagcaagacaggtagctttaggcacaagaaacttgggtcctaaagagtgatattcaagtgacaccaagttctagatgttctccacttcatcctacagacctactcttcgtttctcacccctgcctgagccccaagcacctgcactagccaggtcctcctacgttgagctgttgcttgggtatgttcattgataggaatcaatcagagatcaaacaggaaacccaatgcagaagaattattctagatttctgctttctaggtctgaaccatagagaccttgttgtttcataaaaggtctccattcttaccacatgccccgtccttaatatgctcttcttcctgagttctagaaacagttttatctaccctctgtaattgatttcatataatcttttctaaacatttgtggtctgtccctttattaaactctccatacttacctcttctgagtctctccaagagagactctgtctcatgtggccttcaggagtagagagaaacctttgtgtcttccatggggattgtgatgcaaaataagagggttaaagctggggaaactgtgcccaacaacagactgcctgagatacttttatttaaccccaaactgtctaggaagaacagtttgggtggatttttagatggattgacaaagttctaggaatttggtttgcagaatatcccccatggattatgtatgtatgtacataaattcaagtgataaatgctggaaacttacttgtgttaatatgaatggcaggtgtgttcaggagtgtggtgagaggtatctttgggtcagagtttgagatgacttgagttttgagagaatgttgtatgtacataacagaatgttcaaatggaccaagaagagtacaggaagcaataggcatgtgctttagaggcgaaaatctggagatgtttatcaagcactatttatcaaacgcaagtgatagcaatgaaggagtatggagagctgaagcatgaggtgaaagcaggggcaacaggcccaacagtaagagccattgcaacagacccagtggacgatgacaagaagggaacctaatgtggcagcgagagaaggggcgtgtggaagagaaagcaatgtgcctgggcctgggatacaaaaaaaggagatttagaaagcaaatgagtctagtatgacttggacttgctgcctgtctgacaaagcctagcagatgttgttcacagagaaatgcaagtcaagagagatctaaaccaaaggatggattcactttggggaatgctggaaggatgtttgagtatcccattgcatggcgtctacaaaggtaagccttgatcccaataaacaggtggaactgaatgtacctggatctggaggagaaagaaaagaatacagaaagacaaggtacccaatgacaagaagtcgtataagacctccgtgtgcaagagaaaagacaggaaaggaggcccagaatcccaaatggccagatggccagtcagggatcaggaggagaaagatacaagaccaaggcaacaatcctgatgttaaaaggagccttagtcagttatttctttttggtcaccaggacatctgagaacctgagacatgccaaagattctcccagtagaaaatgcgtacttgactttgcacataaccatagaaaattcagagcgtcccccaggtgagctccatatatacctcatgagaatcctggaggcacaagaacgaagataactgtggtgttgcagtcttagaggaggtgaatagaggtgaaacagatgacagagagaggcacatggcttggcacatggctgtgtatctaaaaataaaaccacatactagaacttcatagacaaaatgtaattatagacaattcggaagagacagatgctgtaagatgtctggaaaggagatggtggaagaattaaaggcttcctttgaaagctgtgacttttatagatgcatagaaatgttaattgtagcatagatttttcacagataggaacttctacagcttaaatgtccaacagtaaaacaactgtgtaaattacagcacttcatctaaatggactatgataaagccattttaaattataatttcaatggcaaggtaatcacatagagccatgtctatgatagcactgagtataaagaaaaccagaatgactctgtgagtacaactacgtactatgtactagatttcactatagtatgcgtctatgtgtgatttttatatattttatagtttgggtgtgtccccatgaagcatgtgctgaatccccaaagcaacagaattgggaagtgagagataggatctttctggaggtttataggtcatgaggaattataatataattataatatgaattataaaagagagtacatctgtgttctctcttacacattctcttctgccttccacaatgaaatactcctagagagattccagcagtgagcctatctttgggtgagcgttccagtcttctcagactgggcaacagtttgagtaacagagcaactctgggcaacagaggcaggcttgggtactccagcctctacaactatgaaccaattctatctctattatctgtaaatgacccagtctatagtattctgatatggcagtgcaaaatggatgggagaaatatataaaacaactagaaagtaaaataaaattacttactaagatatagagtcctgagcagtaacttttattaatatattttggcatggctactcatgatttgttgttgtaaaaatttaaaggtgatgttttccacttccctctgattttatgttgtttagtaatatggtattatagacatgaagccagatatgggttctctcatcctgaccatcaaatctaaaatttgggttatctattcaagaccctcccaggaaatctttccttattctagaaaggattacttagcatgccttatagctcctggcttaagtttctaaatctctactttagacacctgatgaactgtgacgcagaaaagtggtctctgtgtcctgaatgcccacacatagccagggtgcaatgggcagaggaggcaaatgttctatcatttccaagaaatgcactaagcactttcagggaaatagaatttattttttatttcatgaccaccccacagaattttgtgggaactgagaacaagagtttaggttatcacttaagaaatgtccaaagtccacatctcttactagacttattacctaagtccaaattgtgtggctgccttgggatatgacagtatacatgtgagttccaggtaacaagagagatccagcaactccctagattctgcttccagtggcttgtatccaacagagttccccccccccaatggccagttaggattgtttggtgtaaaaactaaaagtgtcagagacacattcattcttcacagttagccctctcccagatgcgccagagagacagcatctagagagtgccgggcctgctttctaggcctgggtttgcagagccactccacacatcctcaaaacataagctgcttcccaggagcctgctctctgctgcctgccgagaaggctggaacactcactaaagaccaggttttcataaagatttcccaacagaaaaggttcagcttgcttgctggcacttaggaatctgagtgtctgcagccacctcctgggacaggcattttcagtcttttttttctcaacttaatcccaacattcactgtctcccacttgttgctttctaaaataaatctaaccgttcattgcgttctcttcccaccatggctaactttaaagagcacagaactcctggtggaaggccacctcctgaaggtgggtattttatctccagcttccagagggatacttgggaaatggtttcaccatatagcccaggatagtctatagaactcgcagtccttctacctcagtcttccaagtacttacaccaatataccatcacaccaagttttgggttccctgcagttttaaagtgatcttctaggtagaaaggaaagcagtgatgtcatacttggccatcccagctctgatttaccttccaaacccaattgtatatgtaatgcatagtcttcattagggtttccattgctgtgaagaaactccatggccaaggcaactcttataaaggacatttaattggggtggttaagtgcaccagaggatgggggttcaattcccagcacccacaatgacatacttactccaacaagaccacaccttttccaacaaggcctcctaattgtgccgctccctgggataagtgttttcaaaccacaggtgttatcgtctctaagatttatctttttgagagaaaatggctgagaatggtgggtgtctgaaccaaactcatcccaggggtctagcatgatatgatgaatgccatctcctgccctgtagcccaggctgaccttgccttgcaaccctcatgtacccacatgcaacccatgtaccatgccttcccaagtgctggagtgaacagcaggtaccaacacccgcagactctgagcacctcctggatgttccttttaggaacatttttctagaattgcctgcacatattttgatcagaagtgtctgactggagcctcatgaatggatccctgggtgcttctgtctcttgcttagagttcatggaggttttaagtatcaccaccttgcatcccagtgttcaattggagggagcgctatgcactgtcttctctttctttgtgaagattagttctcacttcccggatgaaccccatctcaaaagacagaggcattagggtccctggggtcacctccatccatattcagtaaaacctcttcccactcttacccatctgccacatacattttgcttgtcctttctctccctccacaactggttagtcacagagaactaattggttcaagaccacttccccagaattgtcacagctacatcctgcctcccacctcaaagtttttctacctcctggccaggacccttcatttttcaatgggaattgttacatgagagattaaagattttaggactttttttattattgtcatatatttattgtacatagtggtagggttcataaagactttttcattctcacatagcgtgtattttgacagattcactgatcagacttcctctctctcctccctcagtagtcatcttccttcacagaatcagacaatcttacttcaatttctatatcctaaatgtgtataaatctatgtagccatctaaaatctaggctccacagaccagagaaaacatgcgatgtgctgtattctgcctctgagttattttgctttacatgatgaacaggatcccagtcccagccattttttctgcaggcaatgtaatttcattcttttttatgtctggaaaagactccatggtgcacatgtatccagtcatctactgatggattttatcttatttttttttacatataagcaaatgtaataaattttcctatggcaaagatattgcttcaagaaactacagtcagatacacaagaaataaaaacttactagtgaaaggttaaaatatcagtatatttttgtcctgaaaatgctcttttaggtgtataaaagaaggcatatagatgtaactttaagcccagccccatcatacagtacttgtatgtccttcactatctttgggaatcatggtaattaataaaaaagtaacaacaatttctatctacctgatagtttcatacaaagtaatgatgccaataaagcagcctacatggagaaaaagttttaacagcagttgttcctctctgttcatgataattcagagtcaggatgctttggggtgctaaattccctttccatgatcttccttatcacatctttgtactttgtaccttcattttatcagtagacatcccttgtcaaaattgaagaggtattctgaaaacagagttgaatccttcctgaaataattttaaactaagtcctgtaaagaagtaaggaagaaggggagtagcttcgttaaaaaaaaaaaaagcaaaataacttgtaaataaattgtagttagattattcttttcattttgattgattagaggactacaacctcagacaaagtcatatatttcttccaccatcattctctttaactatagcacttgttttccttctagatgcccccccctcacttctttgaaagtccagggaacattccagtcattgattataataaaattttctaaaattaacacagtgattcccatatcataatttccaagatcatgtgtggaaaatagagctttcttgctatcagggaaccagtgggcacattctagtatagtgcaaacagaaagaaaataagatgcaacatgaatattctactttcccccatgacttcacattgtatccttccccaccctaagctgaccagtctttgagatatctttgccgggttgactattctttcaatggcggtgctgttggaaagccaaggtgtttcctctcattttaacaccctaatcttaaagtattcattgctatattttgttgttaagaagtatttgataaagtttgcaagtccaatgggcctctctttccagtgatggccgactaggccatcttttgatatatatgcagctagagtcaagagctccagggtactggttagttcataatgttgttccacctatagggttgcagatccctttagctccttggctactttctctagctcctccattgggagccctatgatccatccattagctgactgtgagcatccacttctgtgtttgctaggccccggcatagtctcacaagagacagctacatctgggtcctttcaataaaatcttgctagtgtatgcaatggtgtcagcgtttggatgctgattatggggtggatccctggatatggcagtctctacatggtccatcctttcatctcagctccaaactttgtctctgtaactccttccatgggtgttttgttcccaaatctaaggaggggcatagtgtccacacttcagtcttcattcttcttgagtttcatgtgtttagcaaattatatcttatatcttgggtatcctaggtttggggctaatatccacttatcagtgagtacatattgtgtgagtttctttgtgaatgtgttacctcactcaggatgatgccctccaggtccatccatttggctaggaatttcataaattcattctttttaatagctgagtagtactccattgtgtagatgtaccacattttctgtatccattcctctgttgaggggcatctaggttctttcaagcttctggctattataaataaggctgctatgaacatagtggagcatgtgtccttcttaccagttggggcatcttctggatatatgcccaggagaggtattgctggatcctccggtagtactatgtccagttttctgaggaaccgccagactgatttccagagtggttgtacaagcctgcactcccaccaacaatggaggagtgttcctctttctccacatccacgccagcatctgctgtcacctgaatttttgatcttagccattctgactggtgtgaggtagaatctcagggttgttttgatttgcatttccctgatgattaaggatgttgaacattttttcaggtgcttctctgccattcggtattcctcaggtgagaattctttgttcagttctgagccccattttttaatggggttatttgattttctgaagtccaccttcttgagttctttatatatgttggatattagtcccctatctgatttaggataggtaaagatcctttcccgatctgttggtggtctttttgtcttattgacggtgtcttttgccttgcagaaactttggagtttcattaggtcccatttgtcaattctcgatcttacagcacaagccattgttgttctgttcaggaatttttcccctgtgcccatatcttcaaggcttttccccactttctcctctataagtttcagtgtctctggttttatgtgaagttccttgatccacttagatttgaccttagtacaaggagataagtatggatcgattcacattcttctacacgataacaaccagttgtgccagcaccaattgttaaaaatgctgtctttcttccactggatggttttagctcccttgtcgaagatcaagtgaccataggtgtgtgggttcatttatgccccagtacaggggaacaccagggccaaaaagggggagtgggtgggcaggggagtgggggtgggtggatatgggggacttttgggatagcattggaaatgtaattgagctgaatacctaataaaaaatggaaaaaaaaaagaagtatttgataaagagcagtacatagactccatcaaaaggttggccctctcttttggggctcgagagatggctcaatggttaagagcactagctgttctcccaagagatctaggttcaattcctagcacctacatgatggctcacaaccacctgtaattccatttataggagatccacaagatgatagcagtaatagaaatatctctcatcaaagagaagcccagatctactgccagattctaccaattttttaaagaggagccaatattattggcttctcaaatggttctatgaaataggaagacaaaggtccttcaattctaaaaccaaactcattacaaaccccagtaccactctgatgccaaactgtaaatgctcacaagtcaactacagttaactaccacgatgactatacctgttaaaattctcaataaaatgtctgcaaagtgaactcaagagcacatgaccaagttggtttcatcccagagaggaaatattggtttaatactcacaaaccaggaagcatgatcagcaaatgaataaatacacttgagggattgaaatcacatattaactcaagtaatgccaagagtcctgacaaacccaacactcctttatgataaaagtacccaagaaactaagaatagaaagaatacaaatcaacataaggaagactattataaaacaaacctaaaatgaacattatagtgaacagagaaaaactgagaccatttcttctaacatgtggaacaaaataggtgcccactctttcttactacagtgatcaaaaaccttatctacagcaataagataaaacaaatcaaggaaaggaagaagccaatttttttctatttttaaatgagacgaccctgtacttagctttggagatcttagctactttgccagaaaacttttagacctgatgaatacttttagcaagataacaggatacaaaatcaacacacaaaaatcagtatgcatatgtatatacaacttgacaacaaagaatctgggtgagttgggtgggagatggatatcattcacagtaggttaaaataactaaagaaaaatactaacaaaggacctgtaagggttctcaggaaaaagttgaagacagtagactttggatagacctccaatgctaagggattgccagaattaatgttgtgaataagaaggtggcagtgggaaaaggtttatatacagatccaatgtaataaaactctcaatgaccttttttatttttaaatattaaaaataatcttttactatatagaaaaaaattgctttaaattctaagcaagccaaaaatggaagccttagctcagctcatccaaggcctctcacacagtaggcaagcactccaacactacagtgctccctgacttagggagatacaggatttagatcccagaatgttaaatagtcacaactgtttctccaagagtgcaatgcattttggggggggcacattcttaaccaacgtttgccttgagctttcctgtaaccttggcttcatgggaacccttcaaaacatcgttgtgaagctgagtcagatgtctgacaatgccaacacaggcatagtgatgcttgcctttagtcacagcactacagaggcagaggcgggtggatctccgagttcagtgccaccttggactacataacagtgccccagaacatgccaattataaaattagtggttccagagaaaccctgcaagagatcaatggtaactattacagagcattgggaaatgaggtgatcagtggccttttcttcacagaagcaggaaaccaacataaagttcataaggaagaacaaagcatcccaaatggcgacactcttaacagaaagaacaatgctataagcactgcaattgctgccttccaattacatagagctatagtaggaaaacagcagctacagtgtggtgctggcacaaaaacaaacaagtaggccaagggaagagaattgaagacccagaattaagcctctactgttacagtcaccagtatctgacaacactggcaaaaacatccattagcaagaggacagcctccttgacaatggtctgagaccatttgattttcacatgcagatgaatgagacttattacttgccctacgcaaaaatgaattccaaatgagtcaaaaaccttaatttgagactcccaaactttgaaacttctagaggaaactacagagaaaagatttcaagatgtcgtaaccacagcagaaaacctgctgaaaaaagacatcaaaggaacagcaaataagctcaagaactgacaagtcgggaaggatgaaatggaaaggcttctgcactgccgagcaaacgataaccagagggaagagacaacacagagagtgggaagacagtctctcccaactccacatcagagaagggattaatatctagaatatataaagaactgcacaaataaaatgtcaaagaccatatcatgtgctaggtaaataggctaatgtctgatttgatagttctcaaaagaagaaatgcaagagcaggagaaatagctccaaggatcctcacacttgtgaggaccagagttcggatccccaaatccatgtgaaagccaaatgggtctagctgcaattctagtgcataggacacagatagggaatccctggaataagctagctagccagcctagtcaaacagcaagctctgggtttagcgaaagacacactgcctcaatatataaggtgcagagtgatcaagaaaggtatccagcattaaccttgggcatgtgcacatgtatacacacacacacacacacacgtgcacacacacacacacacacacacacacacacacgccatatacagggaaaaagaatacaaggggccaatattagatacttaaaaagctatccaacatctttagccatcaagagaatggagatttaaactgctctgagatttcatcccatcccagtcagaatggccatcatcaagaaaacaagtagcaaatgtggatgagggtgtggggagagagggatccttattcaatcttggtggggaatatagactcatatagtcactatggaaaccagtatggaggctcatcataccactgaaaacagaaccaccatacagccaatctataccactcttggcaatatacctgaagggttccaagtcagcatcctacagaggtgccacacccctgtgtttatagttgcaccatttaccataactaggcaatatagtcagatgtccccaacatatcaatggataaaaatatgaggtacatattagagtctgattcaggcaaaatgaaaagttgaataataaccctagccggacacaaggtggaaatcattatatgaagtgaaataaccaaactcagagaaactagaaaatggaccaagatgggaagaagaagtcttaagggacaggaggaagagaaggtaatagaataaatgtgataagcaagcagaggcggttgtctggggaagagtggaaatcagccagcagggtccacaaaacacagggaagaacagtttggaagaaggataattaagataaaatatgatggtgtttatgtagaaaaggacattaaagaaactcattgaattttatgataacttaaaatatattgtttttaaagaatgagttgggagttagaataatctcagaaagctgaaggagaaagactatttgatggctagacaaaggctgctcttctctcgtccccacctgcgatgacaagctatccaggtgtgttctgcattacagccaggagtcctcacatgcatgggagatgcttcactgtgtggctcctggaggcattttgttaaaaccaccccaatgcatatctctgcaactgactgcatagaaattagacagcagctttctcggggagtcgggattctctacacagaatttggccataagggttcttgtccttcacagatggagctctttagcccagggggcacagtagccttttcttggtggattatgaaattggagacagatgccccacccttacccttgatgcttggtgatgtgaatcaatagtgattggattttctgaactaccgtctcaagtcccatttagataggaagaagcgggggctattcaagacagcaaatctgacttcagtcaaattaataacgaggttttcaggaaactaacttctcttactttccttatcagccagatatgtcatatactcttgtttttctctatccgaggccatgtctccaggttggttatggttcctaacagtgcatttattcttatgctttccctcttccaggtagctatagacttcactgcctctaatggggaccccagaaacagctgttccctgcattatatccacccttaccagcctaatgagtacctaaaggccttggtggctgtgggagagatttgccaagactatgacaggtaagagacttcagacatcagctgtggtcttatctctgaggtgggaggtcctatggcccttggctgactcatggccaaagagtggcagtcagtttcggcatctcttgaaagaacggaataaaactttgtgtcaaacatttcatcctctgctcctagagaaactgagttggtgccacatttgctctagtgagccacaaatctccctcccnnnnnnnnnnnnnnnnnnnnntccctccctccctccctccctctctctctctctctctctctctctctctctctctctctgtgctctgctcttattaggttggtgaagtagatagatagcaaatctaagcttcattgtgtggactaagtgtgaaggtgtccttgctcctcacagtttgttcatgagccagcagcaccccgtcccgctgaattggattttacaacttgaagagattcttagacgtgtggtgtacacatctgagttttagatgcatggttttattggatgctcctgcatccatcctctgtattctatgcatcttatataatagccatgattattaaaagaataagactataggaaatataagcaatttgtatactgccccataaacagaaatggtatttgaaccacagtctttcaggttctacatattgagtacaaaatctttgtgttttacctatcttgggagctactggtaacattaacagacagatatgtctgcccaggtgcacatcaatgtggacaggaaagtgtgtgtgtgtgtgtgtgtgtgtgtgtgtgtgtgtgtgtgcgcgcgcgcgcgcgcgtgcgcttacatatatgcagagatgatcttaagattcaatcactattatttatttcttctagcaagctggatttgctgtcactcctgtgtcactggataaagggaaggagcacagatgtttacctaaggtttctggaggtggaaccaatgtaaacacaaaggtgcacctctcagaggactccctagtgtgatggggaaacaagcttagttggtaaggagctgtaagcagctgaccttttaatccaagaagataaacaaagcatctctgtgctctggttgtagagaaacatgagcacatatcgttatttctgttcttcctgagctcattactggtaacaaccactctaaaaacctgtttctgccagagcacagtaaaggacacacccttgtgaaacctccagcatgagctataggaaaggtccagtcagtctcctgcctgctgagatctctattcaatgtggtcagcaaaataccttagtgtagcatagagacacttagggattggcttgccacaccctatgcaatcactgagcagtaagcacccccccccaaactttccagtggctcttgctgcacacctaaagcatacttcagtaaccattttaaatcattgaggatctgtgatggccattcttggctgtcaactgaaccccaagcagctagggacacctatgggaggaatttcttcttgatttaagtcatttaaagtagaaagacttactttcagtctggatcttttgaggtggaaaaaaaatatacctttattttgacccacatcttctgatggcagcctatataaaggacatagaagaaggaagcttttttccctttgcctgcttgctctcactagcagctccattccttcactggcattagagccttcttcttcagaattccagtgaatactgacaactagctgagtcattcagcctcaagaaccaagcaactagtggattcttgggccttctgctggaagacagcgattgttgaactagctggacagcagcctgtgattctaataaatccctatacagagatagacagatagatagatagatagatagatagatagatagatagatagatagatgatagatagatagatagatagatagatagatagatagatagatattcattatataggctctgttcctctagagaaccctgactaatacaaagtgacacccagaatacttgaccttgaggtattgactgtgacaataatgagtttcagctctgacttcttcaggctctaattcagggacaatttctagtaaggtttgaagcagatggggtttttactagcgaggaaagagtttgataaattacatctacagtgtgtcagagacttcttcaagacttgggagtgggaatcctctcttttcctttacttgtgcataatcatgttaatgatgtagtgtaatatagtgtacatgtttggagataagactggaggaagtgttagcaggatccccaatgtttggaccttaagatgcatataatagaaggtaccttgcccagggcagtgatatgtactgtgctcaaccccaacttaagcaacatagtaaggcccccatgtaaaatagaagttaaataaatagataaaagaactgaatacaatacatatgtattgtatatatacatatatacaatatatacatatatatattataagaaccatgaacctgcagagaagaagacatccaatattgaattccacagagcagagaggccagttttctaaaaaccaagatgaggttcagagtctgcatcataatcctatatcaccttcatttgctcatctgggcaatggtccattatcaggaagcatttactggctaattcctgcagagagtgtccattccctggtggcttcccatgcagaatacagacacccttagtcagagccattggatgccgtaaagcattcatccctttcaaatgcaaaccagacaaaagttgacagatatgttgtattccctcaaaaacacatattgaaacatattcactatgtcaccctgggagttatatgaggtcatcagaaattattccttttaaaattttcgtagtgtaattctgaagtcatcattcccagatgaacaagaaattcaacttttggcaggccaacagagcaacacttttatttccgttttaaaaggcaactgaacattaaaatgggaaaattctaaagaagaaagggaaggttgaaaaaaacctctatgctcttttaagagactccctgggagagcttggaaggcaagcagctcccatgaaagctgacaaggttcaccagtttctgttttgtgtgggtggacagacaggagacaggcagagtcagaaaatttcaagtcggggttctggaattaatttattcctgcgtcaaagtcagggaggttggtgcttaaaaagaaacacttgcataaaaactgacagaagccactctccccctcccacaaccacacagaggtttgcagttcccatgagccttagcaactcctctctgcctctgacagccaaggactgtctctctgccctgtatactcatggctccagggtcactagcaggtgacccactgaacagagcagcttgagaggtacataaagctcttctccagatggccttgaagggaggttcccccaaccacaagataacagttcccaaagccagtgttgcccacactatacttcaccatctgcaaaggcatttcaggctatctgcctctcatgaaaacacatgtgaacaaaaacacacatgcaagtaatcacatggccccacacatcccagagtatgtgtacacatacacacgcacacacatacacacacacacacacacacacacacacacacacacacacactcacatttccctgctgtagctggcttccaggaagtgctatcaaagttaaaaccacagctcccatctttttttttaagatttatttatttattatatgtaagtacattgtagctgtcttcagacactacagaaaagggcatcagatctcattacagatggttgtgagccaccatatggttgctgggctttgaactcatgcagtagagcagtcggtgctcttacccactgagccatctcactagccccacagctcccatcttaaagggaatgaatgagcctttattttaaggccatattgaaggaccatggccttaaatttaggttaccctaaatgactggttccaaagaaagtcaaaaatcaaggcaaatttaaaatacacctgtgggtatatctacaaagagcttcttttcaagaattttcgttcacagctttcatattccttgtggacctcagtgccaacgtggcacgctttgcttggggccaggaatgttatgggtctcagacaaccttaactgtcttctaatgaaaagcctggtctgctcctgttggcataggcctgcaatctctgtgactttggaatgtgagacaggaaaactacaagttcaaagccagcctgggcaacttagtgatatcctgtctcatattttctaaaaataaaaacagagctagacatattttggtggtagagcacttacttggcatgcatgagaccctgagttcagtccctgataccatgaaggaaagggggaaggagggaggaaaaggcagcctgtctgtgatctaacgctgcaaacacagtgccagtttaaagaaatggccaactctgaatgcatttgggacacaagaaagcaaggcaggagtgtgctaggtcctgtactgggggagaacttgaagctgaaactcaagctgacacgagttttggtatgtagggcactgggttggtcagcagatgatgtgggttttctcaatacagcctctgtcacaccagaccttgtcgcatcaggattcttaccttgtctgcatgccaaaaccacttgggaagtttcaaaaaattttgatacttgggcctcactcccataggctgatttcattatctgctgtgcccctagaaatctgttgttgtgtggttgttgatgttgttgttgctgctgctgctgttgctgtcactgttgtcatgataggtatccagagttggaatccaccattaactcgcctgcagcctagataccactcttttgtgtgggacagcaaagatttaacatggcagaatttccccatgtcactcacagtctagaggaacacagaggcatgtcagtaagtcatggtgattcaggtgctgtggctcattcctgaaagcatagccagactgaagccagaggaccccaagagtccaaggtcagcctggaatacatcgaaagactatatctcagaacaacaaagcctagccccagctcagcataacccagaaacccttcctgtgtaaggataagaatggaaagtatgtaaggggaggaagggctcccacctcctccctgctgaaggaagagtgggaaggaagagaatcttgacagtagttattgggtcaatgagagagagagagagacagacagacagacagagacagacagacggagacagagacagagagagagagacagagagagacagagagagagagacagagagagacagacagagacagacagagacagacagagagagacagagagagacagagagagacagacagagagagagagagagagagagagagagagagagagattattagaacataggtgtataaatgtgcttattattctggatcattagaccagataagcctcctgtggttaatggagtctacaaggatgatttaaagaatgtgaggtcccaatgacaagtagatctaggttcatatcccagagccacacccctattctcatgagatttatttctttgattgcaaatcagaggcacatctaatttcctttgcagtgctcaggcagttctgcctgtggtaaataatcaatggtggaaagttttatctttaagattcagaatccaatctttaaaaataaactgaacacaaaaagagaaaggaatgtagtgtaggatctaaaggtcatgttggacaaatgacatctgggggtcttgttcctttgtttgttttgttcatttgcctttaaaaggattatgtaaaaatgcatagccttcacacattctttcatagataacatctaactttcttcatcatgactttaaataacgataagaattgaaaactctggagtgttataagtacttaaatacacttaaaaaataaactctaatgtaactcttgtagctgcccattggaatgtctatattatgccatgtagactagctattggcaatcatcctggattttttttttctcaccaaaaaatacctgaaccagctcttcagtttcaaatgtgtgaacttagattttttaacctacagtattactcaattctttcaatgatataacccacccaccaccccaaaaataacagtaatcaaaaactactacttagggtatagagtctggagagatggctcagcaattaagagatagatatcttagcagttaagagcacacatgctgctcttgcagaggaactaagttcagttcccacaatccacagcaggaggctcacagcacctgtaactctagcttcaggagagcgccctcttctggccttcacaggaacctattctcatgtgcacatgccaacagaaaaacatacacatagattattaaaaagggggaaatcttttaaatctttttattacagatgtggaggtcagaggacagctatcaggagttgcttatctgcttctaccatgtgtgcctcaagaatagatcaaattcaggtagtcagattcagtgccaagcatatttaccgactgatctatcttaccagtcccccaaaatacatttttaataacttaccaactgacagtaatccatcctaagttctttcttttatacagtgctagaaatttaacccaaagtcttttacatggtaggtagatgttctacgactgagctacacccccaagcaatttttaaaagtgaaaatggacaataacctgggttacagaagatttggttgttactgaatttcgtagaatttttcttttatctgatgtttgaatcttgtgcttgagagttgaatctcagtacttggttgttggtacttgaatcctgcagaatagttctttcttgatattcagtttttactctctgaagcaatacagcatagcagcacagtggatacaactcagaagaggtaaagaaaaaagtagttgtgaagggagatgcatggatgagaccaggcaccgctaacacagctgctcccagaagagctgggatgtgctcagcagacaatggagaagtagaagaactgaatactgattgcccgtttccaaaagaaagctacactctcatatccccagaagagtgttgcatctctatccataggattgttttaagatgactgtttgaaagactgttttcagccaacatccatgtcctctgagaggccaccttgtttgagttgacctccgttggcatgtagattgggaatttccttgacgtgtattagccccttgctttagctcagtgttttccttaatggagcgagtgaaaagcgtgcttcaaatcaacttctcacatggagatacttggacacagccatttcctgtgaatctaagggcaactggcatgtcactagggaagagcatgggcccttttgttgtgtttaccattgttttagtctgacaataagaaatgtggcctttcccagtgtggacatatacttctgaaatttcccagtggacagtgtttgcctgtctttttctcctgacagctgctaatggcccttatgctctgtggccaatggatccagttctgacttctttgaagtgttctcatattaaaagttttcttttgttcaacttccttcccttagtccttgcataagactcctctctggctcattttatttttaaacaggaggaatggactttaaatctattgtgctaggcttggatttttttccccttcagtatatttattaggtagctttctagtggttgacttcagagaattcagccttctggcgcattaattattctccttgtaggtgaggcattttccctacccttcctctggaaacttaattacataacagtgcatgaagctcagcaaactccaaatccccaaggagggtttagctggtttaaaaagaatatcattaaagcacatgattggtgattggaagtagatgcaacattatatctacccttcctcaagagagggagggagggagagagagagagagagagagagagagagagagagagagagagagagaagaaaatccatcagaagaaagcagagggtgtggcatctcccaggggcctagttctcactcctgaggtatccctgcagtggaagacccatgactcatgttccatcctggaaagttcttctcaacaaagatgaaaatgtagacactttgccccttcttagaattgggagcaaaacacccatggaaggagttacagagacaaagtttggagatgagtctaaaggatggaccatctagagactgccatacccggggatccatcccataatcagcctccaaacgctgacaccattgcacacactagcaagattttgctgaaaggaccctgatatagctgtctcttgtgaggctatgccggggcctagcaaacacagaagtggatgctcacagtcagctattggatggatcacagggcccctaatggaggagctagagaaagtacccaaagagctaaaggggtctgcaaccctataggtggaacaacaatatgaactaaccagtaccccccggagctcgtgtctctagctgcatatgtatcagaagatggcctagtcggccatcagtggaaagagaggcccattggtcgtgcaaactttatatgtcccagtacaggggaactccagggccaagaagtgggagtgggggtgaggggagtgggggggagggtatgggggaacattggaaatgtaaatgaagaaaatacctgaataaaataaaataaagttcttctcacttagccagcaagatcctccctggtcttccactcatttaagctaaggaggaagggctgaggcaaagtcttccaacctttccaagaaccaggaggttttgtgtctcctatttatcaccagtagtactttctctaacagatgtgatacaacagagcctggcttgacacagcaatgaggagacgagggagtgtgtggttttatggcggacttaaacctttacttcagagaactctggtttctctaagtctgtaaccccatctgtgtggacctaactgtgttggaaggttttgtcaaagctgtcatcagttgctagggacttctaagtcaattaggaagggctgggtaggaatctagctttgttgcttggattttctcaaagttgcttgagtttgctcagaaagaggggttaatgtcctcatttcctacagaagatattcagtggtaaacacctaacctgaactgaattcctttttttttttttttttttttttttgcccttgactaattctgtaaagaactgaaaaatgtagaaaccgttccaagaacaaacctcagttgtgttcttaataagagattaaaaaaaaaaagaaaaacaaaaaagaaaaaccaaaccaaacaaacaaacaaaccaaaggcagatgacttctgccaaggttcaatattccagaatgccacagcggcacatatgttgcttaagaaaggtctcattggttgcccactcagtgacctagatactgccattgccagtagatgattaatactacctatagctattacattatgatggcaattagaaaggcatgggcttgggaatcctatattcctctctggtgatcacttttttctgtctttctaagcacagagtaagtagaactcccaggattgtggataagtctgtctaacccctggggcagtggtatcagtcatgactcccttctccattctcttaactacagtgcaggttagttagggttaaggtactgaactgaaactcagtggtaaaggtgagaaggatacagtgcagtcagggttagggggtgctggaatgtgagatggtgatagagctggccacatgtctgcaagctagaggactgccatgtgttaggagctagtctaaattaatgtgcaatttccagaccaatctgggctacagagtgaggcccagcctaagaaacctaaggacaaacaccacaacaagaacttaacacaaaagacagtgtccctttgagttcaggaagtaagaaaagacatgcaaataatttcttgctgtttgtgtataagtttaatgtggacgatacagtgaatcctatcaacatgctttgttgggtagcagctatcaacgtccccgctgccttctgatggctccttagattccggagtgtctgtgtttgaaccctggctctaatcagcagcacaatcttgactgatacctctcctccaggtgtctgcctacaccaaagagagagagagagagagagagagagagagagagagaggggagagagaaagactaagctctttctttagttaaaatatatatgtgtgtgtgtgtgtgtgtgtgtgtgtgtgtgcgcgtgcgtgtatacacacacatatatatgaaatatcctaattcagtcaatgattggagttgccaaactcctcatcactatttcaagaaaacagaacatcataattggggggtggggggtaggatctgtataaatctgaggtccgtttactcttggctatctagcttagtaaaaactttaaggggagagactgtacattaatcagtaatgaacattaatgattgtttcttaattttgattaaccacgctattgcatgactcagcacttggcttggcgacatgccctggtgaggttacacaggctcctgtttctcttccttcttagatgaataaatgaaacagcttctttttatatttaattccagtgacaaaatgttcccagcttttgggtttggcgccaggatacccccggaatacacggtgagtgagtggacctaggatcttgtaactgcacacatcccttgctctctgtgtaactgtggatgtctaacccagagagcagagtgttctgggtatgttgttcaaaggcccagccagagggtctcttggtttaaactcactattaatatgatacgagatggagaaaacacccccaaaacgtttaactccgagaactcaaacaatatctattcagatctccgtagagattgtcagtgccagcgtgtatagtatatagctaggacagacaaaggaagacttgaggtaagtaaaccaaggagggaagctggaagtcagctcacttgtctggaatctgcggaggataaagggacagtgggcacacaccagctgcttcacctgtgacctcccactaagaaaggaggtgtctgtcttttaatgaggtgacctacttttttagcatccaagagacccaacgatcagaaatagcctttgaaatggaattttccatgaaatttcaagtgatttaataaaactgtccagatgccagaatagcccattcctttttatcagatcttagggggaagaaaatagcaagcggtgtgtcgcctaaccttacgcttaggcacggccaggcagggcggtttgtggtggaagattacagggtagatggcttttgtcacttattttttcagaagtagaagacactcgatttcacctgtgtgtacatgaaaatccccatgcactgtaattctggatatcagaatgattcttaaatgtcaacagcttagatagcacctctataagccgcaccatgtccttcgggcatcttgagttgaattctttttttaattggtggtacaagtaagcgcccattcaactttccattcaactttaacccttcagtccgtatccagttgaatctagaaaccaattaaggctactttttccgaagccttttctttctttttttttctttcctttttctttctttctttttcaatatgttatactttccccctccggtgagcatttatctgatcctaaaaaaatcttcctgtcacctcagcaccacagggagctgagacttcaccctccatctcagattgattgtataatggcttaaaatggtacccgctgcttaactcataatgaatgtaacgctatttgtttgcaaaccctaaacctccagtgcctccttaatggattcaagttgtaattctcctttcttcctcttttaaaattttcatcggtgtctaggtctctcatgactttgcaatcaactttaatgaagacaacccggagtgtgcaggtaagtcataaatgtgcagaaagccagtgtctcagagtctgtgacgctgtgcacatttccaggtccggcatctctctagtgaggcacatgggttgtttgcgtcaaagcacagaaatcagctctgaaaacccaaataagccacagtgctccacagggagctgagaaacacattataaggtaagcccacgcaccctcaaagagacagacagactggctaggagaaagtgagctgtcagcaagatcatggatccctccagccaaaacaaagttaatctattaattaaataaaattaatttattcttgattaaaatttcattttagctttgtttatttttgtttgtttgtttgttccttccttttttctttctttctttctttcttccttccttcctttctttctttctttctttctttctttctttctttctttctttcttttctttttttgaatgagagagtagcctatgatggaccaagctaagacattcctctttctgcttctctgcttttcacctgtgttttccacagtttcttttctgtgcaggtttaaggaaaggggggaggatgtggaaatcacttgatgctgccagcacattaacaatgctgacttggaataaatacgttggagagagagagagcaaagactcaacatcttggtccagaccattttactttgttttctcctggctagaaatgcctgaacttgatctcatgagataatgatgcttggggaacaatgataaggatgatcccatctgctctgaagaagtaacaaattaagctgagagcctctgtggctgtgatgttgacatttatagggtgtcaatgtccacactcctctcctcctccttattgagggagaagtgagatgaagtgaagggcgcagaacattctgcagtttctttcatgaacttggcatttactaagactaggatcatcagtgtctttggctctgagcacagtgccctcaaagtcaggatctctgctatcgtagtatttcctcccccatcactcaaaaccagtttattccggtttaagctcctctattctcctgatatccccagtctagctgaaaccctgagcttccaggtcaggaaaagactctgtcaaagacagtaaggtggtttcccaccaaaggagactggggtacataccgtagtgtttaccagctcacactctcagagttcaagtccccgatagtattgaaaaggaaatcaaacttccttctctaaggcaaaagtttgtgtgtgccccgcacccctcgcgccccccccccaaaaaaaaaacaaaaactcagcttcattttgcttcttttccatgtcgtaaaataatttggtttctttggaatggcaggcatctgtgtttcaggctgtcctaggtgggcggagtgttttcaaaaaggtgagaaacccatataaggcagaacagaagagaacttgctcatccgaattgttcacaggctgatttgcagtatatgatggctatggagaacaatttcaacagtgactcctgtgactccctacagtcaaaatcaagagcagtgtgctactttggtaccaagaaggagctaaagcaggggaaagcaaatgtcgcatgggcaacaacagcatccatgtgaataaaatggatttataacggcaatttatttctaatggtctttcatggggccaaagatcgcaggcagaaggacctctcccagcaaaacccctggcttttctttctcctgagaaccatgtgacctcagggtgaacacccgtccttaaatgagcagttgacctcagtcatctcgtaacacccagcgtataggcttgaaggctgtgtccacgtccatggtacactcagtgtcctctcagcactgctgcaagctcttctgtgggggatactgaaatggatgagttatgatccttgcccttactgggtgtggtatctggagagagggtcacaggtgcctgtgacagctacaggcagcagtgtttactctaaaatcaacaaggcgataaacaaacaaacggacctctagagccaactcacttagtggttctttcagctcaaacacctgtatttatacactgagtctgtaactcactttttctggcacctggggcactttctcttaacctctgcttctccacccatgaaactggagcagcttctgcctcctcaaaccttagtgagctaataaaagcttctgaggggtgaaatttgtgggaaaggttgcttttgaccacccattgtgatctgatctcagtgggggaggggaggcaagaaatactgacccagcatttccttttgtcttgagatcctacaagtggtatgaagtattattctggagaaagttaatgtgttgctttcgtgtgtatacaaatatatttgaatggaccacggaactgttgggtttttttttttttcaaatctcatcttaggaattcaaggagtcgtggaagcctatcagagctgtcttcccaagctccagctttatggtcccaccaacatcgctcccatcattcagaaggttgccaagtcagcctcagaggagacaaacaccaaggaagcatcggtaaggagagagacaggattcaccttgcttcttttgattattggtcatactgcccattttagcctgacagtcaattctagttttcctaaatggcttaacttctctatcttcacagtctctttattggaggaaacatgacgttaattaaactctcttctgctgggatgtgaagcttagggtggacacaaatgtcaagtgtctgcctctttgcctgaacacagacactcactagcagaagctactatgttcactgcgttgtgacaatgctcaactcctggccttcctggtctctacactaccatcatgcaacgagctgcttaggctataaccctgaagtaatccgagttccttgacttatgttgtgtttttttcttttcatttcttcttgctgaatgacacacagccttaaccagtttaaagccacaacaaacattcattgtctctgtgaaccagagactcaagcacagctggcctgtgtggactgggcttaggtctcccaaggtttcagctaagatactggccaggagtgaggtcctttgaagagtggcctgaagttgaatgctctgctaatagatggcttagtcccattcctaccatgtggttgctggtctctggtcagagacctcatttcctcattgcttgggataactactaaagaaagtttcccatggcatagcatctggccccacccaggtgatccaagagaagacaaaggagtaactgtgcctcataacttaccacagaagactcacttcatcatctcatgataccctgataatcacacagactagccaactcagtatgaaaaaagaacacacaaggacattaactaggaagtaagagtggctggctgccatcttgaaattctgttaacaccccttccccatccaattgatcagcaagttatgatgctagtctatcttcaaactatatcccatgtgttaccacctctgaataccttcatggacactgttcagggccaacaactgttttcacttacatcaaagcaaattctatgtagaatctgtacttcatctttccccatgaagtgtatcatgcttcatgcagaaaacagactcatcttttggaaacataaataagatattggcagtgaaactcagtggacagagtgcttagcttgcacaaacaaaaccccgagcttaatccctagtaccccatgatgtaggtatgatggtggacacgcataagatcagcatccaggaagtggagacaggagaattagaaaggtatgctcatcctcagctctatactctgttcaaggccatcatgaaatagataaggtagctaagatagattttttaaaaaatgaaaccaaaaccacattctttataaaatcaggcaaggggaaactgagaaaacctgtcccttttcctttgttgacaagagtatctgtgatatctttggcgtttcctgcagcttaatatccttctaggataccaggacctacacaagtaaagggagaatagcaaagacacgggtgtggattctgtgcgattacaagccaacaatgtggtgatggccatcactaacaactccaggaccagatgagtctgctcttgcagagaccgcatagtccaaaggcagaactgcatgtaataaagcaaccataaacaaagtatcagataaataagacctcctggcaacgtggggaatttacgttctctctagaagttcctcccattgttggacactgtgagctagggtcccttgttagcactaggaaagggcattagtttaagcccctcagacaagctgtgtcagaggatcttgcaacaggatttttctctttgataattatagaattcttctaggggtataaatgccccatagacctgatcacacatgagcactttcctaagctgaccttggaatgagctgttattactgctttatttgggaatttccatctggtttgctacaatagtctgtagcttgttaaagttagtacactaaacctggaagaaacaggttctagaatagtcacacttccttgactccaaagagctcttttgttgttgttgttgttgtgagttagcatgtttatgttcattcttactcatgtattagtctttgtaatgctgaggacaaaacccaggacttcctgtgcctgacaagtgttccaccagagctatacctccgctcagaatgtcttaggctcccacacttacttcctgcaaccatcaggcatatttctggaactgcatggaaagtcctcttaggtttgacctgtgtttaatctccctaaacctctttcaacccatgtcacagtggagctagcgtagcgtgctcttgatgggcaacacttgctctcagttgcaatggctcttcctgcactgacaggtttaagagtctttactccaatccccatctcagccccgtggcagcctctccacagggagagggaagaggaaggctgaaaaccaagagccaggacagttttcacatgtgtgctgagagaaccatcataatgacccttaaccagtcatctcctagcagggagttccaccatcataatccaaagggaatacagtaaaagtcctagagactattttaaattctgaggtaaccagatttacaaagtaaaaagaaacaaggagacctattttaataccctttactactaataaaatcccaactagccaacatattggctcattagcatctgattcgtataaaaattatacaaatatgagacattctgggaatttttgtactaagactttaaaatgtttgtgtattttacatttaatgacatctcagttttgggtgctgagttatgacaaacatttggtctttatttagatattataagttgatagatgaaaatatcatacatttaatttggtttgttctaaatttacttttaaaatgttcaataactgaaatgggtctatttttttatttaaaattcaactcctcttttactctagccacatttgaaatgctcaatattttcatgaggttactagctattacacaagacagcacagccctagattttcaaaggtcttcaagctgaaggagatcatataatggtcttgtccctctcagcttttaagaaataaggtatctgagaccaaggcacaaagaggtatttcagacatcacagaacaaagcttggaatccagtactcctgactcccaggcgcctgcttcctacctatcttgagctttataatagtcaataagattatttttatgatgatgatgctacaattattgtggctccattcatcatgaccttaaggctttagagctaccctacataggcttaacatatgtctgttgttgacatgaagccgagatcagatagggcagagctaagaacccaaaaagatacagaggcaacacaggttttgaggtctctctaaagtcaattggaagacagagggcaaacaaataggctggaaggatgggagattgtctagaaggtagacgctggaagactcaatgtcctaagtgtgctagtgatgatgaccagctttggtgaggctgtgagctgacatgaagctgaggcgagggtttacagaagtggagaaggacggacattgatggtctaggagcagagatacaacagtcatctaaagtcaaggccaacattgcatttgggatagtcaccatggtggtagataagagcaaacaagaagcattaaaggagccagaacttttgggattggtggagggtatctacttggaatctaatttggagacaatttgtggggaaaaaaacctgtaccggaaacatgagtgaccagagaatgtttcttgagaccataggttttagtttaaggcagaaattgaaatcacggggagaagcttttctacagcaaaacacaaataccccgtggctttgttcagtaggttatacattttagtttcacatataggatattgttttattagtaaaattttcatctttgtgcatattgcatatggaaatgctgtgatacacagaatatgattcaaaaaatagtacaaagtcagcaggtaaggccaataaataaagcaaggttgaccatatgttgataattgttgatgccaagtaatgaccccacagaggtgcccaggctattttggttttgctctggaatttccttaataaaaagttgaagaaataaacaaaaacgtctattgtccccgctgttgtggtcgttctgcaaggagaccacctagatatagatacctaactaatagtgtattgcatttttctctcccacctgccacctgacttctgactccagcaatacttcatcctgctgatcctgacagacggggtcatcacagacatggctgacacccgggaggccatcgtccacgcctcccacctccccatgtcagtcatcatcgttggggtggggaacgctgacttcagtgacatgcagatgctggacggtgacgacggaattctaaggtcacccaagggagagcctgtccttcgagacatcgtccagtttgtgcccttccggaacttcaaacacgtatgcatagatatcacgggggcatcctcacatctcccatatgtctgtcaatgttgtttgtgatctgttgttcttaaagcagcatcagcagcccctatctaggctgaacaaatcctataggaaggatatacaaatcataactatttggggaagaaagcaaatattgagttacaaatatagtcatggtaaatatagttaccaaaattttgaaaatgcttgcctttgctcatgaagtttagggttgttgtttccttcaggggtgttctaaaaagctgggcagcttattgattactcaaggatacctgggaaagaagcaaggatgagctgaaattcagcctggccctgccaacagaagattatctctgcttggcaaaagtcatgagcaaaatgataagacacttaagccatctcagtatagtgaatgacattggcaatttagtctgctcactcaggagcaagatgattgagctagtacaaatgaatgtggaagtagtttagtgtggtcagagatgggagaaaatgctggaataagctcatcaaagcggactggtccgtggccaagaacatacaaacccataatctttaaatcacttctctgccggacgaaagtcacctgtattctattggtctgtgcagtcgtgagccattatccatagtaagtaatgaagcggagttgtgcttcctggttggctggagcaagcaaacactcaagataattgcctagtatgatattgagaagattctcataacactcttagttctggggataatcactaagcccatagagtcagaagtagattgagattgccacaaaccccaccccaacacagattgtgatatccaacattaagactttcttgggttcatttaaggcctttcagagatgcccaggatatgtctgggagaccattgacgtatagtaggtagacatatagactgcaaatgactgtattctttagtttgcaggcccttgtaagcatcattgaacaacagagcacatctatagcccttgctctccactaaagccctggattctcttctgctgctgttgccactattgagggtggggaggggtgtctaaacatgagctcctagcagaaggaaatgtgcaagtcttcagtgtcctttgctttgtctcctcagtacaggttaccatgaatgcacaaatgcatgtttccttctggaaagagccctgttagcttctacggcagctcctccctatgtgggtagggctccattgctcttgagatacaagagagggaggcatggtgccatgcaatccagtgcaggcttttccacagctctgtgtaatccaatgcaggctctctccactagctgcatagttggaaaagccagtttgctccaaagactctccctcaagtgaacttccaacattcttcacagccaacttactggttgtgtccaagaacatcaaatccaatttgggcttaccctgggacctagccacactaagtagtgacaatctcagcaacagagctattctcagttgtcctattttctgcatgtgctctccaggcatggctccctgcacctctgtctttctgtgacaggcagaatgacagtgtcattctcttctagcaccagccaaatagcctcagctgaaccttcggtcctatgacctgtccaacttctaaaagaagagactgtacactccaggcctccccaagtctcttccttgccatactgccacgtgatcactcttctctttttaaagagggcctcagtgtaattaaaatcatcaagcaagcaggaaatcaatccgctgctgcagatctgagtgtagagggcattttcaagtggcaggggaagctgatctcaccatgagatctaaggtcagtgctataggaaagaataactgcccagcatcccatcttccactttcccatggagagagtttctaaagaaaggtatctgaggctcgtccaaaatttcaagttgtctgctacagacagcaaagtatggcatcaaaaaggtctagcattgttcacatggaagggtatcctggggccgactcaatctgctgcagctatgtcacatggcattcttcttcctaacacccctaggggagagggaaggctgatctcacagggtttgctggtcttccatcagccatgccaaatcccatggggctgaagcactggggttctttgcatggccacacccatgccaacaatgcacattgactcaggactttacatactcaggttccgctgctctgcacccactgggacccaagtgagataagaaagcatgagtccaggttttggagaattttctggagacttgcaaaaaatccatatgctaagcagcccatgggtggataataacctacagttattcccagcgtgtatgtgtgtatagtatgtgatgtatatttgtatgtatgtgtacatatgtgcatgtgtgtaggttggtatgcctgtgtctatggaggccagtcactgacattaggaatcttcttctatcactttccaccttaatttttgagagagtctctgactgaacccaagcttatttgccaagctggtcaaggagctccaagaatctgcatatctccctccccacccagcacaccacagcccagcattgcaattacaggtgcacaggaatgcattccgcactatttacatgagggctggggatacaaatgcaggtccctgtgctggcctggcaagcacgttgttgactgagacatccctccagctctgtgtccaacgttctgacattgcagcatgatatagagtttatgtctgagaaccatgcagtggaattccaaaaactgcaaaggaaaccctcatgatttgaagtttattaccttagcttgattgccttcatccccaccctcagctacatgcagctacacgtcgctgctgtgacctgcagctcgcgggtcctatacccctgaaatgacttcagagcagagacagacccccagacaacaccttccagtttaagctaggcattgacaaaaaaaaaaaaaaatggaagattgttgacaagaactaaagggggactggaaacaaaagaattgtcccaagggagaactgccccaagcaggacaaggacacggtgcccatcttatactctgcgctgtatgtgcatttgcagtctccctggggtgacacaggcagagtgacaggaggattttcacctaccttatcttcatgggtttcaaattagattttgaaaaacatttcattatccaaactaatctactcagaattcaataagccataaataaaagggaggcgaggagctgatatttcatagacaccagtaacccatgagttgcctttcttttgttgctctgtgtgctaacatggtgcgttaaagtgcatagggacaggctctgaactatgtggttctgggcagattgcttaacttctcagtgacacagacttttagtgagatgaggcaaatgctacagatgcattggatggtagaaggtggagtttcttctgtacaatggttagtgtatactgcccatattactgctattaattgccaactgactttgtggttttgccttttttttctatccaactcatgttcctacaacaagcacccatgccagcacagatatacaaggagctccattaggcccagagctttccaatgagctagccactaaccacaagtggatctttgcattcagattcattaaaattagagctggagaaatgacacagtctgtaaagtgcttgttgtgcaaatgttaggacctagttcaatctctagcactcatgtacatgtatttagggcagagcacacaggactggggagctccctggagaaaaccatccctctcaacagccatcaatgtccagtagtttttcatccagggacagggtcttctgagattccacctatctgcactggcatgtcaactggtgttattcatcagctcttgtttaggtgaccatattgttgagctctaaggagtacagctcccctctcatgtatgaacgacactatctcagcagacctcctggtcatctgtctcttataatctgaccacccctcttctgagatctgggtgtagggattgtgttgtgattacatcaactggggctggcctttgactgtactttgcattttgaccagttatgactagaaagcaactgtcacagaaggttacaggggaaaaaaatgtctttgatgaggagtgagcaaacctattcatatgaagctaaatattaacaatgatggctcagatcactcctttcttggttaattccagggtgtggaaatcagtgctgtatggcctcctttcatgggtcttcatgatgataatagggaagtctgtttccaagaattatcattctcattgaagggaaaaaagaaaaggaagaggaaaacagagacaactaagtctgttcccctgaatcaggaagaaaggagttctaaaattcatctatgaaaaatcctcttatatctcataggccaaattaggtcatgtggcatcaatccctagatgtagaaaaagctgggaaaccaagttgggttttggccttctaaactttgtaatcaaggaaaggatggagatgaattctgctcctgcctccatgcctgtgtgaccattagaaaccaaaactcttcatgatgcttctgggcttctcagctaccaggttttttcattcgtttgtttgttttgttgggttttttcatactccattagacagcatggcttctgtttccttcttattttgcttctgagatcagagctaggtgttgaatagtttaagaaagagaagattagaagcacagtccctaggccagctctcctttcttgacagtctcaaatatttgttaaatggtcactctgccaaccttccaattccttcgatagctaacatggtggctcagaccattgaaacaaattgaacaggggttatgaagtcaataccaagggtcagatccaagagtcaggccagctatctatgaccctagagtccactatgctcttgacctcaatcattctctgctacagaatcaatactataagggcattcaagatcctcaccacaatctcactttctaattgaatgactacccaaaccgagtccctactaccactaccacaaccaccaccaccaccaccaccaccaccaccaccacaatcaccttcacaatccaccccaccttccaccaccacccctcacataggaaggagcattctttcttcagatgaatttcttcattagatactttgctgtctctagaatcctcaaatcccacacccgactccccaaaatgttaaatacgtgtccaagttaaatattggaggcatgctggcatttcttctgtgatgacttggtctcacagtgtttgtgactttctataacagcacatctcagatttcagtaggaatcactagagcattgtgttagaaatacagatccccatccaggggcatctgactgtttggaagtgtctgatgcgataacactggtgggcagcctgtacaacctgacacctcatagaagggttgaacttggccatgccaagtcaccttcacacgacttttactcattccagagttccaccacttctggcatagcaaccggaacataggtatctaaaaatgaatgcaaattttaaaacaaagcaaaaccctgcaggacagttcatcctcagatgtgggtttacatttgcagacacagagcgtgaacactgagtgggtgatggttggatgactgagggaaggaagctggccactcagggcagggctcagatctttgcatctgtgtctcatccgcttcaaatgatggttgtttctttttccctgcaggcatcgccagctgcccttgccaagagtgtgttggctgaagtcccaaatcaagtcgtagactattacaatggtaaagggattaaaccaaagtgctcatcggaagtatatgaatcgtcccggacactggcaccgtgaactacacttttacagaattctgaagcactgtttatctattcctgtactttaaataacaacaaaaacaaacaaaaaaaacccaataatatacatttaaagatagcacgttttggtgatttttaattaactgactttttattttattttattttttgcatgtgtagcccaaggcctggatctgttaaacccttgaattgttaaagactttttacaatgaaatacagttataacatactctttacagcatgtcgccttggaattaaaatggtatatgtatccatttttataccggtttgttgaaattttgctaaatttcttattatctttacactgtaaagcattttgaaacatttcgtgaatgtcgatagccaaaacgtatatttggcttaatctcctataggatgagagatttttcaaaatggcagatgcatggactgtattttgcatgtttaaaataattataataaaaataaccttacactgtttttgcagttgttatctataatctctccctgctgagaatggtctctctctactaaataaatttatgtacctagaggtagtcttttttgaagcgggcttgggttatttatcccagtacccatctttacacactcccattgacacaaattcctggacaatcttgttctaatgaagctttctaatgcggggcctgaggttctgcacatctcacaaggtcctcaatgatgctagtgcatcccttgcatggcatgaggactaatggggctctgaacttgaggctttcaccacagagatcatgccaaacagaacaactcctagcctgtttgcccatggcacctcttccacccaccaggctccccagtagcttagaggaccagcctgtctccaagatgagactagaaagtaaggagactgattccagaagctgtccacccgacatcccagcctcgctgttttatagccccgcctcttcctcatccggactgaggagcacgccttctggtttgctcctgcttggctaaaaggggcagcacagctccctgcatgggtggttccattttttatgccagttcctagaaattatttcccaagattcctcccttggatctttgagtgggatcctcttcatgccaaatagcaacatggctgtccaactttccgttctaatcgcttggtctttgagctcactgtgggggccttttttgaccgcttttgtatcactcctgagtacaatttccataagcagaagtgccctggaattgtgtagggtggagatattttgtctgaatctaaggaagtctaaaaccaaaataatgacttcctcttctcttatgatattctctccaagaaatggacaaatgttttataagctataaaaggcacaaaatgtaacttatttttggtcagaaaaatagagaagtgtatccaaagcaaaagaaatctgttgttggggtagtttgggttctttttctttttttttgaagcggaaacaataataattaattaagcaaatcaaatgtcttgtacgatttccagagttataattatagattatcttgcaaatacatgtcaaccaaatgcataacattttgggaatgatggtttaaaaaatgtacgacagaaaaaaacagtcacaaatgtttaaattgtattgttttctgaataaattgggtactaacagaatctttctaagagttgtgctcttcttcctctttttgaagcaatttcctgtcagtgagttgtgtatgtcacatgcttgaggggccatcaggggacactggtgcttcaccattgcttctaacttgaaatagttaagctctatattacagaaatacctaacgactgtttctaaccccaagccggtgtgtgaacagtcatgtctatgtacctggtatgtaggaagtactcagctagttaggcaatgcagaggtgaacaataacatgaatgaataaacaattagacttatcaatgccgcctctgatctatatatctgacctgtgatagatttaatatgtgggatgagtgtttgtgactgtccttaagtggcggcgtgccatgttgtcccatgatatcctccaatatctcctgggatgtcttcactcagtgtagactccctgggatgtcgaattagtaaggacagagtccaatttgcctgacagacatttaggaagtttacttccctttacatagccagactcaagttcaggccccttccctgcccccaaatagtaaaaatagtactgaacgatcatttaagggtatctcatcccagatttctacagcaaaataacacacagtagcttgaatagcagaattttatttttcatggtttaggagtctaggaagaccaagatcaaggtgtcagccatttggattctaatgggacctctctttctttctttttttttaaaattaggtatttatttcatttacatttccaatgctatcccaaaagtcctccacatgctcccccacctactcccccacccacccactcccacttcttggccctggcgttcccctgtactgggacatataaagtttacaagaccaatgggcctctctttccactgatggccgactaggccatcttctgatacatatgcagctagagacacgagctccaggggagtactggttagttcattttgttgttccatctatagggttgcagttccctttagctccttgggtactttctctagctcctccactgggggccctgtgatccatccaatagctgactgtgagcatccacttctgtgtttgctaggccccggcatagcctcacaagagacagctatatcagggtcctttcagcaaaatcttgctagtgtgtgcaatggtgtcagcgtttggaggctgattatgggatggatccccggatatggcagtctctagatggtccatcctttcatctcagctccaaactttgtctctgtaactctctttctaactcacagttagacatttaactttgccttagcttccatgatatagaaaaaaaaaaagagttctctgtttttacaagaacactaatccccccacaagaatgtcttcctcattacctagccatctcacaaagcgtctacctgctaatagtatcacagtgggtaccaggtctcccatatgtgaactgtggaagggcacaaacatggtcagtaacaagaggtgactgtgaaactgatgtcactctaagttctttttttttttccttttttttaaaattaggtattttcctcgtttacattttcaatgctatcccaaaggtcccccatacccatcccccaatcccctacccacccactccccccttttggccctggcgttcccctgtactggggcatataaagtttgcaagtccaatgggcctctctttgcagtgatggccgactaggccatcttttgatacgtatgcagctaaagacaagagctcccgggtactggttagttcatattgttgttccacctacagggttgcagttccctatagatccttgggtaatttctctagctcctccataaggggcaatgtgacccatccaatagctgactgtgatcatccacttctgtgtttgctaggccccggaacaagagagagctataactgggtcctttcagtgaaatcttgctagtgtatgcaatggtgtcagcatttggaagctgattatgggatggatccctgcatatggcaatcactagatggtccatcctttcgtcacagctccaaattttgtctctgtaactccttccatgggtgttttgttcccatttctaagaaagggtaaagtgtccacactttggtctttgttcttcttgaatttaatgcgtttggcaagttgtatcttatatcttgggtatcctaagtttctgggctaatatccacttatcagtgagtacatattgtgtgagttcctttgtgattgggttacttcactcaggatgataccctccaggtccatccatttgcctaggaatttcataaattcatttttttaatagctgagtagtattccattgtgtaaatataccacattttctgtatccattcctctgttgaggggcatctgggttctttccagcttctggctattataaacaaggctgctatgaacatagtggagcatgtgttcttcttaccggttaggacatcttctggatatatgcccaggagaggtattgctggatcctccggtagtactatgtccaattttctgagggactgccagactgatttgcagagtggttgtacaagcttgcaatcccaccaacaatggaggagtgttcccctttctccacatcctcgccagcatctgctgtcacctgaatttttgatcttagccattctgactggagtgaagtgggatctcagggttgttttgatttgcatttccctgatgattaaggatgttcttgttgcgtatgactcacttatttctctggagtttcggggatcatagtatcaggttctctatgaggagtggaaattggattttacccacttgccacccatctcccagggcaggcttctcaatccataccttctaaatagagaactcacaggcaaaccctctactgaaactgggtgggacagagtcagcttttcaggccctggtagcaatttggctaaatcttgtcttctggagtgagtgctcagaggagtctggggagccgagccctccatgctgtaagccaactactgttctcttcgacaacagtgctccaaaatcagatataaaagccagacaccattgatgtctttggttctcttcttaaaccttagatattgaaggctgtctctttttttgtgaccagttttagcaggcaaaaagaaaccaaagaaatacatatatgtgtagttcatataagtaacatgtgaacatattttatactcacatgcgcacacacacacttgggggtaggggtaaagggggtatgcaaatctaaagagttatcacgtgaccccaaagaaaggtggcatccacaacacatatacagccagaacaaaaagggcacctgtttaatatctgaatattccttactaatttgtttggcagaggggaagctatccccaggtctctgcccttgtcagctaagcagactgatatcagttaaaaacagtttttgctctaagttgagccccacccccttttaactgaaatcagctggcttctggcagtcacgtgcttctgactacccagaatggaagccttggctttaaggcaaatgtggaagcaaaggatttccaccgacactatgaagtacatagagtcaaaggaagaagtctagcaaagactggaaagacatgtactgcaggcaaaactgaggcagaaaagctccctctgaattcagtgcccacgtggttttcacatggtgctctaaaacagcaaaacaaggcaaaactgttcccttgattgacaggcagcagcacaatgaggaaaaattttagtgaaatgagatagatcaaaaaagaatgagcaagaactcaggaaaaacaaggttttagggagaaatagcttaaatggaggaatgctgtcactagattggaaatgtccatggcttccttagtgaagcaagaatctgaatggctactctggatcctgaatccaaattcacgtagaaatctccatctctaccctcttggcactgtactcagccatgcttatattaataacagacccttaggaaatctgtaagaaagtgggttaaattgcttgtcatgcatcaaagcctcgaattcaaatccacagaacctaattgaagtgatacatgacagcttgtgtctgtaatcatgacacttctactgtgacatggaaggtggagacaagagactcctgggggttcacagtctagctatcctgctttacacatcagcaaactctggaagacagcctctgagtagaagatgatgacggacatccagaattgtctccaatgttgtgtgcacacacctgcattcatcgatacaaacatatatacgtacacatgcacacgccaaacacacacacaaagacctttgcccccaattttggaacatctctctcatctgaggattgccatcttcctctcatgggctcttctctttcccccagcatgggagcagcagatcctcaggacactgccaggtctttccaccatctaggcacatatagaccacatatagacacatataagggtaccatatagaccagacactacatatgtggatgcttcagggatctgagcaagccatatgagtaatgcaggaccagagggtaggaacggagggccaagggaaagcctgtgcccaaaagacggcagccacagctcaggggaccaagcagaaatgtggacccagtgcagactgtctatcttcttttcagcaaaatcgtaaactctgtggctttgcatgaaacccgttaatattacctattagaaacaggataggagtcaaacaatgccagtcaaaagagaactaacactaggtttaagttgactctgggggctagtatgacaacaaggggtcatctggcctcctccccatcgggtctcatgactctcgaagactactagtgttcttttctgagtttgtgtctcttgatatttgtattagaaagagaaactggaagtcaagcatggcgctgcccacttgtctagagacagacccatgaagcctatctagcaagttggagattagtctgtgttacatgagagctttgtgtcagaagaagggggaagttgaaattgaaaatgtagtaagtaacaaaagtcaactcattatatctttttttaaaatttttttagtgtggaatagagtttatttagggcatggggaggggaattaagagagtattagaggcaaagaaaggcagagagaaggagagagtagagaagtagaggctggccatggccacatggagagagggggaaagggaattcagagagaagggacacaagggggaaagaggcaagaaagcatcaagagtgtaagagggtaagagcaactcattatgtcttatcagcaataaatacttaagagactgaagagatgggtcagtggttaaagagtaaagcaagggccatgtaagtttgaggaccagagttcagatccccagaaccaatatcaatgccaggtagacatgacaccccacctgtatctctactctctgaaagtggagaagagagatcccccgagcaggctggctagtgagactagccatattgggtttgatggcgaaactctgcctcaaagaacaggatgggagggctatcaagagtgatgcctagctagcatcgacctcagctttccacaagcatgctcacacacatgttgtgagcaccccccaaacacacacacacacacacacacatacacatgcccacacacatgcaacacacatacacataaaaatggaaaaagaaataaatattataattttattttaaaactattttcaaaagataagaggaattagactgatagtcttcaaatttggcaaatcttcagtgatgttctcatttctactttgcattcaacctcttgttgggtttttgttgttgttgttgttgttgttgttgttgttttatatttataagcacatattagtggaacatatttatatggtgcagggagatgtttcaatacatttttctatgattaaatcatggtaaatgttgttccaggaagcatttgtgaaccccaaagaccaccaaggagccatctctgatgtaatagcattagggtctctattacaagctcaggcttgtgctctcctccaactcaaccctgacacagcagaataggaagggaaggcagagcagccttgaacactcagcagaacaaggttgtatagggaatgggagcaagtgagggggtgtccatcctgccaagcatctaactggatgtctattgtaagcagacaggtgggtgctctgaagcaagaacatgaactaattacatctgaaagagtcagactaatctgttgctagaaagtagctatggagtaactctttggtatagaccaaggacaagtcatggggtccttcctggtagttaggtgcagcttgggttctgttgcaggtcaagttctcagggtttttaatttttctttaagatggaggccagtcccaagatggtataggtttggcctctcatgatgagcatatccatcactttcaatggttattctgtactgcaataattcagtcaaaaattttaattctattctttgaggtaagataggtgaaccctgaggacactgtgttaactgacataggccaggcacagaaagacaagggctacatgatctccagtgactgtggagtctaacacaggcggtcttccagaaggaaggaatagaacgtgattacccaaagctggggctgtagaaaggtgtagcagataggatagacagcaagagacatgatgctctgtgtgaactccaacactgaaagtcacaaaccacgtgtgtctcgggctttctagtgctgtgacagaacaccatgaccagaagcaacttggaaaggaacaggtttatttcagatgataatcctcaagtcacactcttcactgagagaagttggtgtagaaacttctggcaggaacctggaggcaggaactgaggtagagaccatggaggaatgctgttttctggcttgttctctgtgacttgcccagcctgctttcttatagaacccaggaacatctctccaggggtggcactgtcctcatgcttgcccacatcagtcatgaaccaagaaaatgcccccaaagagtgcctgaaaggtgagtcagtctggtgaaggcaatttcttaactgatggtcctatttttagcttttggttgtaatcaatcacattatgtttccatctcattcaaagtcaatccagcgcaggattgtaaatgtcgaacaggagatcatagcaataaaatttacctggcatttgtcaatagcttctttgcttatgaaggattttgtaatgtcatgcattggtaatctagaaaatgttagttcactcagatgtatcagatagtctaaacgcttacacagttgatttaacaacatcaaaacatcgcatgacctactgctgtctaatagcactttatctcatcaagaaagtattgagaatctgtcaaatattggcagcacatttaatttttttaaatcctaatccttgctagaaagctcaaatgttaccattggcaataagccctgtcggatgttcttcttggagcgacaggctcacttcactcaacttcaagaaaaatgtatccaaacattcatgtctggataatctgtcaatccttcttttaaaaatgttttttggaagagtgatgttctgtgggggaaatccactatcccaatcccaatacaatcgtgggcttacttttcctgtggggatcgttttaggtagaaatgaaatccaagtacttatgtgtgttttgcaatttatcaccaagcctattaaatggacatggacttgggaacaccaatacttaaagaaattgttgtgtgagaagatgtttcctgggtaaatgcttcacagatccacttataccaaacagggagcctatgagagaccaacatgtagataccacacaagtctgacttggtgaaccgtgagttttcctgaggttactgatgggaatatgagcaagagattatttgcaggagcagaaatgactcaaagatatctgcaccaccaaaacccaccccagcatggtgacagctcacagacgctgggaacctggagaacaccggtggcaaagcctgtaggcagctcaataggttagagagtgtcctttccaagggatttaggacacctcttctgggcagctcttaggcatatgccccacctacctcttgtgtgtgaaggtcacagcaaagcatcagagcttgtagggaaatgatgcacacaaggtaaaatgaaaactagaaactcttagttgggctggttcaacctgctagagtctgacaccagatggttcatgttagacatattttaagtacactattactttggggtaaaagtttcctggtaataattatcaatcttacctgcacaataaggcttaaggtgtgtgaacacattgaaactcttctgcaaaatgcatgagacagagaagatgtgttccatagtttaaggacctaggatctgatgtgctctctgagcgagatagtgtagtagtcagcaggctatgaagtacaggtgacatctcccctaagggtgagttatattgactataagacaaagataaagatctagggagggagagtctgggatacacattctgagggatttgggtgaagtctggtcctacagatagcaaaggtcaccaggtcattaaaaaatccacttccaccttctgagtggaaaacagctatacatttcctccattgaggagacagccctgatgactaatggggtggtttctccagtacttaactgtgaacacctgtgtcctctacacttgggtgcctgccccacctaccccttggttatgtgatgctgttattttcttagcaaaccccatttatgtgacccttctgaaattctttcctgtggtacactgtccttgctacacctgagtgaagtctcggaggagaaaagggtgtctccttggtatgtttaatgatagggccagattctgttttcctagcttgtctgtgacaggatgcttacctgagcttccttcaaaacctaggatagatgaaaaaatatgatacatcaaaataacgttaaaactggacactgtgcttattgtaaatagttatggttcgttaagtgcactgtcagtaaatcctgggagaaaagtaaaatttacataaaacctttacttatttatcttatattttctgataacatacatttatccccaaaattctagcctcctgtgtcagtgtcaaaatgaattttattagtcagcattctctagagtcgtagaacttatggaagaatttctctatatattaagggagtttattgtgatgacttacagtctatagtccaactaaacacaacaatgggcagctgtggatgggaattcaaaaaatctagtagttgctcagtcccacaggctagatgtctcagctggtcttctgtagaagtaggttccaacagatgtgctggcaggtaagtgcaagcagttgaagaagagtgaatcttccttcttccaacgtctttatgtaggtccccagtagaaggtgtggcccagattaatgtgtgtaccaccacacctgaatcagggacttgttttgtcccaggctgatcttgaactcagagatctccttgtctcagtctcctggaattaaaggagcgtgcatactaccttccctgggcctaagctttccatagccactgtgcctcaaaaatctccatgtcaagattcaggtcaaaaacttgtgtcttccaacctcaagttctcgatcacaggtgtgccttccaactctggattggagttcgttccagacatagtcaagatgacaaccaggaatagccaccacatgaacctaagtgggttttgtaaagaacattttctctttttttatgcataggcgtgttttgcttgagtgtttgtaagtgcattcatatactgtggttggtgcaggcaccacgtgggtgctgggaattgaacctgcatcctttgaaagaatatgtgttcttaactgctgagccatttctccattccacaccctctccaacc

SEQ ID NO: 1645 - DNA, 3107 bp, Mus musculus
ctttcaggtggacaggacggaggtgattcgtacctgcataaacccagtgtactcaaagctgtttacagtggacttttattttgaagaggtccaacgtctccggtttgaagttcatgacatcagcagcaaccacaatggactgaaggaggctgacttccttggtggcatggagtgcacacttggccagattgtctcacagagaaagctctccaagtccttgctgaagcatgggaacacagcagggaaatcctccatcacggtgattgctgaagaattatcgggcaatgacgactatgttgagcttgcattcaatgcacggaaattggatgataaggatttcttcagtaaatcagacccatttctggaaattttcagaatgaacgatgacgcgactcaacagcttgtgcatcgaacagaggttgtgatgaataacttaagcccagcctggaagtcattcaaagtatcggtaaactctctatgcagtggagatccagaccgcaggctgaagtgcatagtgtgggactgggactccaacggcaagcatgacttcatcggagagttcacctccaccttcaaggagatgagaggagccatggaagggaaacaggtacagtgggaatgcatcaaccccaagtacaaagccaagaagaaaaattacaagaactcaggcatggtgattctaaaccagtgcaaggtagctatagacttcactgcctctaatggggaccccagaaacagctgttccctgcattatatccacccttaccagcctaatgagtacctaaaggccttggtggctgtgggagagatttgccaagactatgacagtgacaaaatgttcccagcttttgggtttggcgccaggatacccccggaatacacggtctctcatgactttgcaatcaactttaatgaagacaacccggagtgtgcaggaattcaaggagtcgtggaagcctatcagagctgtcttcccaagctccagctttatggtcccaccaacatcgctcccatcattcagaaggttgccaagtcagcctcagaggagacaaacaccaaggaagcatcgcaatacttcatcctgctgatcctgacagacggggtcatcacagacatggctgacacccgggaggccatcgtccacgcctcccacctccccatgtcagtcatcatcgttggggtggggaacgctgacttcagtgacatgcagatgctggacggtgacgacggaattctaaggtcacccaagggagagcctgtccttcgagacatcgtccagtttgtgcccttccggaacttcaaacacgcatcgccagctgcccttgccaagagtgtgttggctgaagtcccaaatcaagtcgtagactattacaatggtaaagggattaaaccaaagtgctcatcggaagtatatgaatcgtcccggacactggcaccgtgaactacacttttacagaattctgaagcactgtttatctattcctgtactttaaataacaacaaaaacaaacaaaaaaaacccaataatatacatttaaagatagcacgttttggtgatttttaattaactgactttttattttattttattttttgcatgtgtagcccaaggcctggatctgttaaacccttgaattgttaaagactttttacaatgaaatacagttataacatactctttacagcatgtcgccttggaattaaaatggtatatgtatccatttttataccggtttgttgaaattttgctaaatttcttattatctttacactgtaaagcattttgaaacatttcgtgaatgtcgatagccaaaacgtatatttggcttaatctcctataggatgagagatttttcaaaatggcagatgcatggactgtattttgcatgtttaaaataattataataaaaataaccttacactgtttttgcagttgttatctataatctctccctgctgagaatggtctctctctactaaataaatttatgtacctagaggtagtcttttttgaagcgggcttgggttatttatcccagtacccatctttacacactcccattgacacaaattcctggacaatcttgttctaatgaagctttctaatgcggggcctgaggttctgcacatctcacaaggtcctcaatgatgctagtgcatcccttgcatggcatgaggactaatggggctctgaacttgaggctttcaccacagagatcatgccaaacagaacaactcctagcctgtttgcccatggcacctcttccacccaccaggctccccagtagcttagaggaccagcctgtctccaagatgagactagaaagtaaggagactgattccagaagctgtccacccgacatcccagcctcgctgttttatagccccgcctcttcctcatccggactgaggagcacgccttctggtttgctcctgcttggctaaaaggggcagcacagctccctgcatgggtggttccattttttatgccagttcctagaaattatttcccaagattcctcccttggatctttgagtgggatcctcttcatgccaaatagcaacatggctgtccaactttccgttctaatcgcttggtctttgagctcactgtgggggccttttttgaccgcttttgtatcactcctgagtacaatttccataagcagaagtgccctggaattgtgtagggtggagatattttgtctgaatctaaggaagtctaaaaccaaaataatgacttcctcttctcttatgatattctctccaagaaatggacaaatgttttataagctataaaaggcacaaaatgtaacttatttttggtcagaaaaatagagaagtgtatccaaagcaaaagaaatctgttgttggggtagtttgggttctttttctttttttttgaagcggaaacaataataattaattaagcaaatcaaatgtcttgtacgatttccagagttataattatagattatcttgcaaatacatgtcaaccaaatgcataacattttgggaatgatggtttaaaaaatgtacgacagaaaaaaacagtcacaaatgtttaaattgtattgttttctgaataaattgggtactaacagaat

SEQ ID NO: 1646 - protein, 473 aa, Mus musculus
FQVDRTEVIRTCINPVYSKLFTVDFYFEEVQRLRFEVHDISSNHNGLKEADFLGGMECTLGQIVSQRKLSKSLLKHGNTAGKSSITVIAEELSGNDDYVELAFNARKLDDKDFFSKSDPFLEIFRMNDDATQQLVHRTEVVMNNLSPAWKSFKVSVNSLCSGDPDRRLKCIVWDWDSNGKHDFIGEFTSTFKEMRGAMEGKQVQWECINPKYKAKKKNYKNSGMVILNQCKVAIDFTNGDPRNSCSLHYIHPYQPNEYLKALVAVGEICQDYDSDKMFPAFGFGARIPPEYTVSHDFAINFNEDNPECAGIQGVVEAYQSCLPKLQLYGPTNIAPIIQKVAKSASEETNTKEASQYFILLILTDGVITDMADTREAIVHASHLPMSVIIVGVGNADFSDMQMLDGDDGILRSPKGEPVLRDIVQFVPFRNFKHDAAKSVLAEVPNQVVDYYNGKGIKPKCSSEVYESSRTLAP

SEQ ID NO: 1647 - DNA, 209484 bp, Homo sapiens
  misc_feature (1)...(209484): n = a, g ,c or t
cttcactatttttaaacatcaattaataagaaaaccaaggctctccatcctcgggtgacctctctggaggactccacagctgtaacagagaaatgagatggtgggaacatcctgttaataaccaacatctgagtgaagtgaaaattgctttacacttgtgtgggattagactcctagcttctataaactgaggatctgacagtcactgcaagttcgagtgactgcaatccaacaccttcctgctcccaatcttggcaggctctgcctgcttttagcaggcaggcatgaattttgtgaggcagtttctgattgcttgatatttatgtgccagcttacagctggagttggggggtatacggcagttgatttaggactgaaaaacatcttctatgttatagaatcatatcttgtcctctggcctggaacattttgatttctcatgagatattctaggggggctttagccaagtggaaggaacttaaagagcaaaatataacaagaggaggaagagaaagtttgaagattggtaaacactgtgctggacactcaacagtcacactgaagagacttttcagggtttgttgcccagacgatggtgtttggagcattgagcattctgaatggccccacttgaaaaattgctgtggtcagatggtacctgaatatatttgtcttcttcaagagaggtgctatgtcatgggaaacagctttaagggaaatctcaagtagttccatcactcgacagctgggtgaccttaggcaagttaacctttttggttctaagtttcctcatgtgtaaaacagtaagtcataatatatagttgttgggatgattaagtggaataaggtatgtaaagtggtttaaataattcttggtgcatacccattgctcagtaaatgctccttatgatccattgttgagtaacattgggaaatatggtgttgtcactaacaggaagttaccacaaaaatcacatatggattacaagttttcaaagttttaaaagcccataattcattaatcatgaaccatcagaatggacacaatttcacctgcccttgagatttagaagctcttccaggttctgtaatatcttgaaacatttttaagagcattaaggaatcaatcaaagttccagcagaaaaagagatgttcatgaagggaccgcttcaagatgtgtgggcaaggttaaaggaaccagcaagagactctgagatgccctgggactagcaatagtcagaagctactattagagggacttggtgggcagacagcggtggcagtgttactggaacccagggagagctggagctttgcaggaagggcggctaggagggcctgtagacagagggtacaccatgggttcctcctgtcttctagtctcctactggtgctttccattggctgaaagaaggtgagctgggccaagaaacctgaatgaaacaatccacatgtgggctggtctcctggtacatagcagagcagaaagacctggggatgtaaaggagaatggataccatattcactaactcttgtttcacaaatagggagtgtgccagttaatggagtgcttgattggataaaacatccaaataaaccaactttgcccataatacgattatttctttcattcattccttatgtcctatagtgacataagcagcagtcaaaatggcagctttcaaagaagcaggaaagtattagcatataaggtctgatccagaggttggggtgtggtattcagagtagatcacacactagccctggttcctggttgtcatccactttggagctgagccataacagttggaatatagtattattggttctacaacttaactgtgcattggaatcacctgggtagatttttaaattgctgatgcattggttccccgccacccccacacagtttccaaattaattggtttggagatccccaggtggtttcgatgcaagaaaagtttgagaattactagtatatatgttgacatcacctgggaatctccaggccaattaaatgtgtgtgtactatacaggatttcactaaactacagcaagatagagctggcacaggctagaacagtactgtccccatgtggctatttaaatttaaatttaaaattccattcttcagtcccactagccacatttcaagtgctgaatacctacatgtggctagtttggaccatgaagaacatcatggaaagttctatcacacagcactaggacagtgacaaacccctcaagctgagtggactggggcaaaagacaatgaggcatacaaaccgagaaatcagaaaacagcctcacaaactggacactcacactggggaaaaggaacagctatagaggacacgcagcatttggcactggaagatgtagctgagatctacgcttctgtggcaaatcaggcaggatttgctcatgctctgtgtggatggagccagcagcttgaaggtactgaggaggccaacgaaggaaggggaagacccagaacatattagcacttgagacctctctgatggtgcctacgggggatactcatttcatttacttctgagccacattcctaagcaaggatgcaaccctgctgtctgctttgaatagcataagtaccaggctatgtctactggtgaaacgaatgtctagctctaggttctccggcatgttcatcccaggggatccataagcagaacccagtgtgccagaggccctgttacttgagaaccaggttaactgcatggcaggaggatgaaggcagggttcaatggattgaaagtgggagaaagacacttgtcatgctggatcactcgttcagtttaatctggagtatttgaaggttttactgcttgatgggtgaagagtgcttttttggagatatatccattaagtggtgctgccagtctggatgtttcttaagtagaatggtgtatttgtttaccagggttgccatagcaaagtaccataaactgggtggcttaaacaacagaaatttattccttcacagttctggaggctagaagtccaagatcaagacatcagaatgtcagcagaactggttctctctggggttactaggaagaaattgcttaatgctcctctcctggcttttggtagttttgctggaaatctttggcatttcttggcttgtgctgaggaacaagagattgcaccactctgctctcttcctttgtgttcacatggcattctccctgtgttcatgtctgtgtcaaaatttcccatttttataaggacattagtcatatcaaatcagaaaccgaccatactccagtatgaccttatcctaagttaattacttctgccacaatcctatttccatatgaagtcacattctaagacactggtatatgaattttgagggataaaactcaacctataacaaatgacatagtataataaaaagagcatatattctagagtgagaaagactggagttgagtcttacctttgccactacttttctgatacacagttttattttatcatttgcaaagttagaatgatatatttaataggatcatttgtaaaattataaatcagtgttaaaatgaaccattatttttatgtttccctaggaaagaaaaaaattgtttccaattatactatgacatatcaattataatatgcatcccaatttcaaagatattccaattaaacaatatatcatcaattacaacatgcatcccaatttcagagatattccaattaaacaatggtatatcattaattataacatgcactccaatttcaaatatattccaattaaacaatggcatataattaaaacacacataccaatttcaaatatatcaaactgtgaaataaaagtatgttttaaagttgatgagggtaaggcttgaagaagataacatgtaagtgccttctgcctgagcagaaaagttaccatcactgtcggtcaccacctaatttgccatccatttcaagaaggaatttaataatttactaggcaggaggcagcttccacccaagttgttaaggagaaacaaaggctgtcaaatactcaggcatttttttagtcctaggaactagtgagcaggaacccctggtccatgtggcagatcagccagacagccagaaatgatgcaacctcagtatgtagacatatcacacagaaatggcacaaatcaattcaagtttccacatgagactttttacacaaccagcaaactgttaaggagttttaatcctaacaaagtagaaaatccatttaaattgaaaattaaaaccatgtctcatcagcaccaacctatctctctctgttgagtgattttgagatctgcaacttgtttgttgcagctacagaacaagccactaactctgaggccagtcacttaaaatcagcagtcacaagcagctgaaatcctgaaattgaataatgctatttctggtggcttggtgattcattttattatctaacttttgtgtggtttaatatgtctccttggaagttacatggtttgaaaaattgcctgtaataaatcctttatttttaaacataaagccattctttattcagagaaaattagtttctccctaccctcactaaataaatattgacaaaatatttaaagaatatcagtttgaaggaatacctaattataagcctgccctgagggcctcttgtctctctctggcctatgatgtcattctttaccaagacctattacccatgggatgataagggcctgaatttctccaggaaaccttagagcattcagtgactgacaataattttggcttttgccttcacctcctccccactgatagcatcacacgatttagctctcacctctcccgcaactttgcctgtggcagttccagcccttggaagtcccagagaatagatggccattgtacaaatagtcttgaattgtttgttgatgacacattgccccgcacacaagccaatttttttttttttttttttttttttgaggctctgttgcccaggctggagtgcagtggcctgatctctgttcactgcaagctccgcctcccgggttcacgccattctcctgcctcagcctcccgagtagctgggactacaggcgcctgccaccacgaccggctaatttttttttttgtaagtagagacggggtttcaccatgttagccaggatggtctccatctcctgacctcgtgatccgcccgcctcggcctcccaaagtgctgggattataggcgtgagccactgcgcccggccacacaatccaatttctatgggcagtgtttagggcccccactgtatctcaaatatgtccagtggataaatcagatctccagagacacaactgcagcctcaatcattgactttccctatcagttccacattttatgtttgtcgtctggatgatgcattactttgagcaacagtgtttatgaaaaaatgcttcaaatttgcataactatatagcatagaggttaaacacacaggttctggagcttaactacataggttcacatcccacctctgctacctacaagttgtgtaaaatcggaaaagttatggcggtctctctatctcccagtaagagaggataataacagtacctacctcatattgttataagaatgaaaacagagtgcttgtcaaaagatttgaaaagctgcttcatcaaagaagatacacaggtggcaagtaagcatacgaaaagagcctcagcatcattagttttaggaaaacgaaaattaaaaccacaatgagagaccactccacacctactagaacttaaaaagttaagcaaaaatctctttcactcctacatatttacccaaaagaagaggaaatacatgcccatacaaaggattgtacatgaatatgtcatgcagttttatatgtaatagccaaaaactgtaaacaattcaaatgtccatctgtaattgactgggggcaataaaaggataaactactgataggaccacatgaataaatctcaaaataattgcgtgaaagattaaagacaataaaagaccacagattatgatatacatttatataatattataaagaatacaaactagactgtagtctcagaaagcagatcagtagtttcttgggaatggaaggagggaaggttgagaggatgaggatacataggagtaagagaaaaatttgggtgcatggatatgctcactctcttgattgtggtgatgttttcacaagtatatatgtgtcaaaacatattgaattgtatactttaaatagatatatactttaaatagatgtggtttattatatgcaaattatgcctcaataatgctgttttttttaaatgagcaccatgatagcaggccttccaaaagtgttagttgttattgactttattattagactgaaaaatgttttagatttttttttcttttttttgagacggagtcttgctctgtcgcccaggctggagtgcagtggcggggtttcaccatgttaggcaggatggtcttgatttcctgactttgtgatccaccctcctcggcctccaaaagtgctgggattacaggcttgagccactgcgcctggccgtgttttagatatttttaaaagcttctcatgagaagcaatattcaatggttgagtctctcaccatcacaccataatctagctgcctttttcctttctaaggatgctcatgaattgaggaaagtagtccagactttgaggtcagaaggcatgagttcaagtgcccactctgacattcaataccttgtgctgatatttaaccttgagttttctcatttgtaaaatagtatacaactatatcacatgatagccataagaatcaaattttaaaaatggatgtgagcatgttctgtaaacaataaagcaatgtgaatttatcagtcatcacgattagggaagagagaagataagcattcacatttttgcagactggataacagagggtaagcaagattaaaataaaacttgacctcacacaagagcatgagatagactctacatctcctcatttcccctaggactgatgttcccacaccagaattctctagaacacttttttagagatttctgggtcctaccatatactcactaaatcagaatgacctggggttaggaaacaggaatctgagttttaaagaaagcccccccgccccccccagttgattaggatgcagctggtagcaccagtaagtgaatgatcttttgggaaaaactgccttgaccctgatgcctctcaatgagaaatgaacaatcctaggccctgttgctcatgtgaaacctggattaggcaccagaaaaaaataatgcatcttccataataactggaaatgcataatattttaaaacatctttcaaatatgcatttattattgcaagcacttcgcttattgtcattttcctgcttttcctgagcagttatattcaggattcttagtggctttctgattatccttggaaatcgtctgtcttgctaatacaaatgtttatcacttaatgtctttccatcttgtcatttcgctcaaaaaaccaagtcactcagtgctggcagcttaccttgtatagtgtgtatgaggtgtgtggcttgatgccaacatgaactttataagggaatgccactggaaaatcaagaagttagaagaaaagtaccagaattggtgcacatcacttatttgtgccctttggggcagttaaaggagaataacaaagactagagtttccatcacctgtcttctatcatctaaacctattcagcactctcttccagcaacaaggagagcaggtgccctttttgtgtcttgaggatgtcaaatgcacccacagcatacttcttggggttatttccaaatcctctatcaaaagatacaatataaatataattaaatctcttatatggctcattatttcatgaatttggaccagatgttgcaaaaaatgcctctaggggccaggaagagaaattaaatgannnnnnnnnnnnnnnnnnnnnnnnnnnnnnnnnnnnnnnnnnnnnnnnnnnnnnnnnnnnnnnnnnnnnnnnnnnnnnnnnnnnnnnnnnnnnnnnnnnnnnnnnnnnnnnnnnnnnnnnnnnnnnnnnnnnnnnnnnnnnnnnnnnnnnnnnnnnnnnnnnnnnnnnnnnnnnnnnnnnnnnnnnnnnnnnnnnnnnnnnnnnnnnnnnnnnnnnnnnnnnnnnnnnnnnnnnnnnnnnnnnnnnnnnnnnnnnnnnnnnnnnnnnnnnnnnnnnnnnnnnnnnnnnnnnnnnnnnnnnnnnnnnnnnnnnnnnnnnnnnnnnnnnnnnnnnnnnnnnnnnnnnnnnnnnnnnnnnnnnnnnnnnnnnnnnnnnnnnnnnnnnnnnnnnnnnnnnnnnnnnnnnnnnnnnnnnnnnnnnnnnnnnnnnnnnnnnnnnnnnnnnnnnnnnnnnnnnnnnnnnnnnnnnnnnnnnnnnnnnnnnnnnnnnnnnnnnnnnnnnnnnnnnnnnnnnnnnnnnnnnnnnnnnnnnnnnnnnnnnnnnnnnnnnnnnnnnnnnnnnnnnnnnnnnnnnnnnnnnnnnnnnnnnnnnnnnnnnnnnnnnnnnnnnnnnnnnnnnnnnnnnnnnnnnnnnnnnnnnnnnnnnnnnnnnnnnnnnnnnnnnnnnnnnnnnnnnnnnnnnnnnnnnnnnnnnnnnnnnnnnnnnnnnnnnnnnnnnnnnnnnnnnnnnnnnnnnnnnnnnnnnnnnnnnnnnnnnnnnnnnnnnnnnnnnnnnnnnnnnnnnnnnnnnnnnnnnnnnnnnnnnnnnnnnnnnnnnnnnnnnnnnnnnnnnnnnnnnnnnnnnnnnnnnnnnnnnnnnnnnnnnnnnnnnnnnnnnnnnnnnnnnnnnnnnnnnnnnnnnnnnnnnnnnnnnnnnnnnnnnnnnnnnnnnnnnnnnnnnnnnnnnnnnnnnnnnnnnnnnnnnnnnnnnnnnnnnnnnnnnnnnnnnnnnnnnnnnnnnnnnnnnnnnnnnnnnnnnnnnnnnnnnnnnnnnnnnnnnnnnnnnnnnnnnnnnnnnnnnnnnnnnnnnnnnnnnnnnnnnnnnnnnnnnnnnnnnnnnnnnnnnnnnnnnnnnnnnnnnnnnnnnnnnnnnnnnnnnnnnnnnnnnnnnnnnnnnnnnnnnnnnnnnnnnnnnnnnnnnnnnnnnnnnnnnnnnnnnnnnnnnnnnnnnnnnnnnnnnnnnnnnnnnnnnnnnnnnnnnnnnnnnnnnnnnnnnnnnnnnnnnnnnnnnnnnnnnnnnnnnnnnnnnnnnnnnnnnnnnnnnnnnnnnnnnnnnnnnnnnnnnnnnnnnnnnnnnnnnnnntcaacacccctgtgttaattgaaatgaatgggctgaacattatacacttaataaagggcatactcgagaccaaaggcagttattgtcttatctattctcatggtttttctacttcattatgctggaaatcatggattaggaaacttagagttggctaaaatgagacacctacatagcactttctccattactgtgcccaccagacatttttaatcaattacagatttctttcctcctgagcctagatgtgacctcaggcacattaggcgggacaaggttgaatcaatcatgaaatgcatcaatcaatcatttatgcacctgcataaacccagtgtactcaaaaatttttactgttcataatgttcacccactcatttcaattccctggacctcagttttcccatcaacaaaatgacataatgatataatgatacaattttgtataatgcaaactcatacaatgagctctaaatcttcaagttatttacatgtctaacattattttcttccctaaaactcgtctcattctctgaaggtattgcctgtactttgtacttttggactgcccacccaatgacttgctggggagcatttatggttgggaagaagggaagtgctctgagatgaattttcttgaacggtaataataaaaataatccttatctctgataggttttctctttctccttgcaggttgacaggactgaggtgattcgcacctgcataaacccagtgtactcaaaactgtttactgtggacttttactttgaggaggtgcagcgcctgcggtttgaagtccatgacatcagcagcaaccacaatgggctgaaggaggccgacttccttggtggcatggagtgcacacttggccaggtgggtcaacagacatcccttcctcctccttgccatcctagggcctttcttcctgccccctttccctctcttccttcatctaatccttgctttttcctattgattgtattttctttaacatgcagcattttacaacttcccaggtggtgtcatatccattatgtttatgtagagatgattctgcaagtctgtacgatttcttattttgaaaaattcagaactttctcttctgaattcccccactgtgtcactcatttattcaacaactattattgagcacttatgtgtctggctctatgctcttttcacatgtctgttatagccttatcctgtttcactataaatttccatctccaactcagctgtgagaacccctatgcagcaagtatttctcattcacatttagtcgacatctctggtaccaaaaatagcccaaggcagaggctaaatggatactcagtgaatgaataaaagctcttaattttccaacaataatatgaaataaatatcagtattatatccattttatcagtgagaaacctgagactcagagaggttaagtgatttgatgaaggctctacctaataagtagcagtgttaggactctactaggtcttcctgactctaaacttcatcattttgcttctgtaatacttttccttttttcctttcctttttgttgtacccagaaatgcagtaagtgagtcaaaaagtaaaaacagtccctgtgcccagatagtggataatcttactggagaaggcatagtaatatgcacttcaaatagagcagttcattacaaaataccctgggctctctatacaaggtcgtagaccttaaaggaagagagagcttttttctactgggtagagtcaaagaaggcattgtggcaccaaaatctgaaaaaaacattatctagggattgcagaagaaagaggaggggagacttccaagtaagaaagcaatataagcaactcataggggtcagaacaaacgtgggggggtatggggtgggaagagaccactttccctgactgaatcaagatgctgatttactgtgaaattgatgaagctttaacatcagatcccctctctcatgtgggccccttccatggctctgtgtcacatttttattttgtactttttttctcaaagagagattccaaattatatgtcttaagacccacaaaatctgggttcacctcctgtcaaggtaagggtcaggtttaaggatttgtcaggaagagtctacctgacaaagagatggcaagcatatatatttgcttgttcatttgtgcttaccttgcttcatgccacttatcactaaaagaaatttctcccagtgagcactaagagacaaaatagacagtgtcctctgttccccttttccagaaaatatagtgattaattttcttattcctttaatgaaagtcaaaagcccaatactgaaatacagttgaggggagacagaaagagaatctgaaatattctccattaacatatgttctctaatgacttttgaagagttgatggcagatagttcaaaggatcttgccaggtacaatgtccactaagtaggtattaaatgaataaatgcattgtggatttgagatgaaatcctgtttctatttaaaaatgattaaaatggcatcttttatagacatgtaagccatgccaagattctcccttaaacaatgggcatccctcctatgcataaattttatattttgtcacaagaaataaaggtagatccggccaggcgcggtggctcacaccagtaatcctagcactttgggaagccaaggagggcagatcacgaggccaggagatcgagaccatcctggataacacggtgaaaccccgtctctactaaaaatacaaaaaaatagccgggtgtggtggcaggtgcctatagtcccagctactcgtgaggctgaggcaggaggatggcgtgaacccggaaggcggagcttgcagtgagccgagatcgtgccagtgcgctccagcctgggtgacagagcaagactccgtctcaaaaaaaaaaaaaaaatggtagatccgtgtgggaatcatgtggactaaagatctttttttttttttttttttggtccaaagctttgataattttatctgtttgaatgaccctcaaactcaaatctttagtccctcacaaggctcatctttccaaaagccagtaagtccttaaccttgcaagtaagacaggcattatgctaggtgccagtgacactgtggtgagccaaaaaacataatccttgccttcaagcagcagtttagttggggataaagatggaatgaaaataattacacaacaattaattaaatggcgattatcataagctttgttacagagaagtacagaataagagagcaagcattgggagactggcatcaggcagagagagggatcaaataaggctttctaagagaagtgacatttatactgacttgaagggagagtgagagtgcatcaggtgagaagaaagagaaacacattctaagcagatgggaacattatacacaaagcctctgtattcaggaaggagtttggcatatggtgcagagcatcttcatttggtttttccaagaagccaaatctgaggtaagaagtcaaaggaggtgaaggaaacgccatagtggagaggaaaagtgagacaggataagcagcctacaagggaaagtggtcaagtagataccaccgtacgtaactggagcttaactctgctggggaaattctgagagcagtgtaatgcaaacattacagatatttcatcctgtggatgagggaactgggacatttatacactttgtgtatatatactcacatcagccatgaagaaccattcctagccgggcgcggtggctcacgcctgtaatcccagcactttgggaagccgaggcaggcggatcacaaggtcaggagatcgagaccatcctggctaacacggtgaaaccccatctctactaaaaatgcaaaaaattagctgggcgtggtggtgcatgcctgtagtcccagctactcgggaggctgaggcaggagaatcacttgaacccaggaggcagaggttgcattgagccgagatcatgccactgcactccagcctgggtgacagtgagactccgtctcaaaaaaaaaaaaaaaaaaacccattcctgttcctaaggtgggaacattaatcctccagtcctccaacatttctggcctactgtgcaggtagcaaactccaaatatcacaaagagcttgcaagcaaagaaatacagatgccggtggtcaaagtcagtgatgggcactcaagtcatagggcctgggaatatgagtggggagctgacagcatctgtggattgcctatttaatacccaatcacccactcttgtagctgttgactctgatcactttctgatcattttataccatctgtctatgtagaaaagagccctatccctagctcaagagtgaatcctgagtgatctcagctaatcacatgaatctcatcacccacttgcaagagtttggtttagaggtaggcgtgtgtccagtaagacatgtggatttttcttggaaaggtttcctagcctaaaacaagagacacgcatgaagaaacagttcttctttgcctgtgattcctggaaccactacagccatcttgcagcaaggctgaggatgagagtgacccttaggggaggtcagacccaaaagatgtggagggatgggcctgacattctttacctgggacccactctatctatggatgccttattatgggaaaataaaatgtcctgtcattgaagctgtttgacatgggaatttttattccttgaactgaaaacatcatgatggagatagcacatatgaggaactaaaaagaaggacaggctggctggagtggggtgaacaaagggaaactagggggttgtgttggattaattttcttaatctttcaaaagaaggaatgtgtggaagtgagcactgagaatgagattacaaatagtcctttcaagatacgtttttggtacttttgaaagaacttatatactgatcatttcatttgaccctcttgacagcctgggaaggacaggaatcattatctacattttataactgaggaaactgaagatcagaaagatttaatgtcttgacagggcctaaactggaagtcaggagcttttgattcttaatccagagcttgcttctgtcatgacctagggaaggatgagaggaggtcacctgttctgagaactccttcaagatcatggcctagatgaagcaaatgagcagcaagtgacttgttcagtgtatctctaaaccatgtttcccaaactgtactgatccactttgaggtgacatgctggcctctctggatatctcgcatgttctttggcaaccaccctctcatattgtcagccaggtgattggtggggttggcctttcccacacttttgggtaggcacagaatattacatttgtgtggccacagtgattggctcaaggaaagacatgatgactcctttaacactatagatttcattcattcgtttatttcttcttttaatgacatagcaattgcatgccaagctttcataacaaacgtttagcaagcaccctggatatgccaagtatacctggctgggtgctggagacacaaagatgaaaaaggaagacagaggccctgcctcagaaaagcttataattatctgagaaacacagactggtaaataaatactcaaaatgcatattactaagcactacaatagaaatgtgaatccaagggctgtaggggaaagacctctacctaaagtgaagcaggggagtctcacaggaaaggtgtctctggatctgaatccctaaggataagtaggaattcaccaacagagaaaagaaataaggactcttgggacaaaatgactggtacacgcaaagacacagcagcatgaagggaacgacagagaactcttaagtgacttagcgtgggtgagcggtcaagtgaggatgtgaaaaggatagaggatgccagatagaaaagaaaaagcctggtcctgatgcttttaagtgtttttctctaaactttagagagactggacttgatgcactgaggtcctaactggggaaaggacaagattggatgtgtatattagaaagatcactttggccgggtgcagtggctcacgcctgtaatccaagcacgctgaggctggcagatcatgaggtcaggagtttgagaccagcctggacaacatagtgaaacccatctctactaaaaatacaaaatattagccaggcatggtggcaggcgcctgtaattccagctacttgaaaggctgaggcaggagaattgcttgaacccgggaggcagaggttgcagttagccgagatcatgcccagcccaggcaacagtgcaatactctgtctcaaaagaaagaaagaaagagagagagacagagagagagagagagacagagagagagaaagaacagaaaggagagaaagaaaagaaagaaagaaagaaaagaaagaaagaaagaaagaaagaaagaaagaaagagaaagaaaagaaagaaagaaaggagggagggaggaaagaaagggagcgaggaaggaaggaaggaaggaagaaagatcactttggcattccccataaacggtggatggcagggaaaccaattaggatactagtgcaataacaggaaggaaatgcgggcggcagtagttatgtaaactgaaaagagggggccagaaaagagcctgtccaagagcagaatcaacaagccttggagatgaggtgagggaggcggagtttgcaggtgtctggcttagctaactgggggagcgatttggctgtctttaaggggaaatcaatcttgcccaggatgggggtgaggaatataacatgatgctggcctattaaatgcagatatctgtggagaattcagaggagggtgacaatcggcagctgacatgaatatagaatagacaatatagatgtgggagcttaatccctataggtgatagctgctaatattagagtggatgagattcttcgaggaggctgttttatctttacttttgaaaggaaattttttgaacgtgccatatataaacaaataataaagaattaaaaaatcaaggcatatgtaaggacatctctttccactttcagataaaagtgtgaactcgatgttgtctttaagaaaaaaaaaaaaaacctttgttgagtgttttttacatggagtaatatgccagacaaatgcatttgtactaaaagctttgtgaaggacaggcagaactttttaccctttgtggtttcacaggttttgacactttggcgtgaatgggggttttgctcttttcgctaaattgctcctctccagtatgatcaagcaaaaagaaaaaacatcaacattttccttctttaaaactccagagtaaaaagaaggtccttcttcctgtgttctgcctagataggcaaggaatggctagatgcagatgttgggcacccccgggcagggcagggtcagagtctgaggcactgtttcctagtgctgacgtgtacatggtgtggggtctgatggtctggggtcaaatcccagctcagctgctctcaacttgtttgtccagaggcaaattcttgcagccacttaagcctcagtttcttcatttgaaaaatggaaataataatagtgctgacttcaagaaaaattgcaaggatcaagtagaataatgcacataaaatgcttaacagagcccccggcatggagggagcactcgggatggggaagctgttattactgtggcaagaatctaggaaatgatgggaagaggcaatgcttgtagagaccaacatgttttcagaacaaagggggaaacatacagcgtgaaaacattgtgagagagcacctacgtcctgggcgagtataatagtaaaactgaacttacattgctcaggtttgtcaagtattttactgagttggattttaaatattgtgtgtgtacacacacgtacacgtgtatttattcttctgatactatttttaagtaaaaattgttttaaatcaggtctctgaaataatttggggcaattattttaatttgggccttaactgtggcaagatagggattgccacagttaaggccctaaaggaaagataaagtgacttccccaaagccacacaggaactcacacattcagagtctgcctcctgaaggctgctgtagtactcgctctgtctggctgagtttgccacattctcactcagccttgtgaaacagcaggactcctggcctttaggaaaggaaaatagaagccttaagcatgctagaaactggcattggtcataaagctgagtataagcacagcaagtgacttcacactgagcaaaaatgccaaataaagcaaagaaggctgaggtcctcagggaaactcaaggagaattgaccattcttgacagatggatgagggggatgcatcacgaggacatagggtactcagaagctgcctctttctgggtaagttttgagaccttccttagatttctgttgcccaaaagaaatcaaggagctaagcccctcttctgctacatccagtagtgggtacgccaaagagagatgtgatccttcactgcctagaacagcaagctgaccttctttcatgtgatgcatttattttctctttcactgcttattaactcattcattcatcctcatattttcccacttcatccaccaaagacagtggaactgagtcataaataagaaaaataattaaagaaatttttaaactccaggcacttttatttagtaggcactgggtgaagctgttgctatactgcacttcatttaatcagcacaacatccctgagaggtaggcactaccattattaccattttacagctgaggaaactgagactgagtaaagctcagtaagttatccaaggtcacacagcaagttgtcgatctctttagctccaaagccctgtataatcttttccatctattctaatagcttgtcactaactagtataaatgatcaagtagcatctatgaatgcaaagtcaaattggagttgacctggctagtttttggtgtcttgtttcttcttaagtttatttgtcttacacagagctgatagaggcagactaggaatccttttgcagataaatgggcttgatcatcttccctctgggcttctctactgaatttactttaaatataatatggcttcttaaaaaatggcagtgtgtcaacctccgaaaaccaaaatcttacaaactcagcacccagaaggtgcattgctctggccttcctttcaccttcaaccatgatgaaaaatcccttatcaaaattcagtggttgcacctgggtttcatcattgcttttcttgcaggcattttctcttctcagtggtttggaggacagttatgactgtgtgaagtcatcttctcttcattgttgtgtggctgttcttcagtgtatgtctcctccagaagttcagaggacacctgtcaaagccaagaacttcctgctttctgtcatcataagtggggctgggaaatccctgacaccttgaagaagtcctgggctgtcaggagtcctctgacccttattcatgagagagagattatataccatcttctctcagggcagtggttctcaaacttgagcatgtggcagaatcacctggaggcatattaaaatacaaattgctaggcctcacccccagagttatgattcaaaagatctagggagagattcaataatctgcattttctaagttcccaggtgatgcttattctgcaggtccagacatcacactttgagaagccctgccccaatgcctcatgtaagaggatgctaatgaatcttggacactgtattactagtttcaatcaagaaaggaaccagtgttttgggtaattatctggagaaattgaagaggacatagaaaacatctggtgaacagaaaaaagttgctttataaagtttacactacaaaaaggccaatgtacacagctttcagtttatgctcttggtaaagattttgagtgccaaagttttttctcccattcattaaatgaagttaaatggacttattatccattggtttccttcctgacataagtgaatgttaggattatgtcaggcacagtggtccctgaaagagtgggcagaccacaagctattgatcaatgggtattaggtttagtgtcgggatgagccaggttgctgaacactgggtgttatgatgatgctgagggtggtacccaaactcaatgtaatgcccacagtaagattccacaggttagcattttgttgcatactatctaatatcctcatggtataaaattgatgacccagggaagtcaaatttacacattacagcagggaagtcattctccttctgcttctcacatgcaaagcttgcccttactttgcagaattactgcaagcagaagccacgtgagtgatgaatgatgtcataagtaatcacatcatctcagctcccgtggactagataagaaatcctgggaagtagtgccatttttttttttacggctgtctgttctgctcataggcagctgggatttaagtagggtggttgtgggtgagaaggccccatttctacagggagaatataattaattcttgctctttttttctaacttctaaacaggcaaggaatcataactttggatcctagaaacatccctctgctttctctggagtcctccttttatactttgaaatctcctttagtgtcctggattggagtcatgagtcctatgtcttgatctgccatcaactctctgtatggccttgggcagtttgcttaacctctctgtgatatggtgacttcatctatagaacaaacattttgcattgattcatctctaagttccttccagttctaatagtcaatgattctcattcatctctttccttttcttgttttcgaaattcagcatctctccacacattctcatttcttttcaagacactctctcccccttccactaccctttctcatctcatctcatctcagcatgaagtatttatctcatgtaaagtcatagatgtcgttcagtcatagatggtatcattctacctacctggtagcccccaggaaaacaactgtatttaatttcaaagatagttataaaaagatgtatttagtgacaattaacacaggcccttttccatatacactcacattcattagtatgatacttctacaagctcaatattggtgcagaggagggcaagagctttggagctggatgacaatttgcaaggactagtgtatcaatgctaaaaaaaaaacagctacaggagcctgtcctgatcctaatcctttaagccaggctggtgcagggcacccagcccccagaccaccctatcagtgtgccctgggcctacctactcatccagggagccacttatgccacctgggttggcaggtggcataaggcagtttctcaggacctctcccacagctcccacttttgttgtttccaaccagctttcatttcaatcccatttccaccagctcagaagtactggctgtaaatctaatttagatcgctatctccatggcatttacacatactcttccaatcattcagcccttgtgtttcccctacaaatgctgccatgctgcaccttctcgattgtcagcatcctggctgctttaaataaaaatgtatgtccttgtcctagccctaaagcatgaaacactccaacactataaactgaattcatagtatggcaaacggccagtttgttgaagtctaataaccaaaaagccaattcacgaaataatatattaacccccaaaccaactctcttccaattacttttatttactaaaaactagatttcttgaactattgataaagtttactacaattattttagaagttgtgaagatttcgggaatatttgttggtttagactgcttatgaaatttagttattggttatcatgaatgtttctgaatatcaaatgtagccattaaaaagctaacctgtcccaacaggggattaaaaatatggtcctaactattaaagtacccatttctttacaggccaagagactgggaggatatatttttaaatgttaacggtgatgacatctaggttgtgggattatagatgatgtaggaaattacatctgtgcttttgtatttctaaaaggaaactatatcacatctatgattagaaaaatattataataaatgttaggcaaaacatcataataagacccgcatgctgacttcaaagaactcacactcaggtggaggagtaagacacgtaaacattgtgtagatttttaaacaaatgtggaagaactttaaaacttgtaaagaattctaatttgggaaatttacaggaaatccttttgggggaggcatttgctgaagctgtgctttctgtgaggtttttgaaagatcaatttgcagatgttagtccccacccctttgtccacagggaggagagttggctgggctaatttgattctgatcttttgaaatattatttttgattacagaagagacccaggagggcttggggcacgaagaacaaataagttaaggaacatctctggaactgaaaatgaggttctgagattcctccaaagtctagactcctcatttcaagctttatttgggaaagagaatagttttactttaaattaacctaataaagttgagggggaggaaaacaataactgcttggtttacaaaagcattcccacgagtcttggtttcagattcacagacaaaatgaggccgggtatgaattaattagctttgttttgcatggaacatgagccgtcaagggcccttcccatgtgagcacaggtcagcaaaggtgcatgctcttgggcctaatctccatccaggtaagcccagggtgggctgattactcgtgcttccctcactcttcttcagcatctgctcatcaggatgctcaggccagcacacgttttcaagccagttatcagaaacaaaggaaaacatatcccccaaacttctctctccccactgagattcaaaccagtaaaactggtattacagtgaatgtgctgacagggcaccagtcagcaagaccgaatcagaaaagcttaaaattgagaagacaaaagcagtgctgagtttagccaaccagagcaggcatctctgtgctgctctctggtgctcctggacaatgcttaaatactctttaagggggaattcacttttacatatcaggtattgtgagaatgatagggtaacctatgactcagtttgcccctgcctgtccggtttacacttactatcatggcttaattattaacactgttccctctcactttcaaaagtgtcccaatttggacaatatattttacgaccacttgatgataatcattttcatagctagtatttagtaagagctgatcacatgccaggcaatcatgagcttggtgctatcaacactatcatcatcattattatcatcactaggccaagattacatgcctcctgaagtggcaaaggaagggcttaacacctaacatttggattcagtcagagtgctaagctacttttcccttacctttaagctacattacctctgagcttttgttttataaacttaatgagaaaaagattcttgtccctttatgaatgccccaggtcttcccactgacttcctccttggttgtcaatcgaagggaagaaactgattttcagggggtcttgttatatctcagatattatgttatgtgaagccccgcttgataaattatgaattaggctctgggagctcaactgattcaccaaagagtacactgacagtaagttgcagagcgaaatttcaaacctaagttgttctgatttcaatacctgccttctcattatactaccttgcctactaagccactttcaatttctacaagcctgtgtaaatttgaaaaggtagagtagcagttcttcccatatgctgtcactgtaaaactgcccacagagaggataaaagtatccttcctcacaagttgataaattgactcctatatctaaaaagtgtctttttcccagctcaggcagacctgtaacatctatctgcaaatggacactccaccaaaatactcttggaccaaaaggtctaagaaatgtatagcagttagaccccatctttcccttgacatggatctattgtttatatggcagttaagggtaacaataatctgaaaataactgatatgtattcaatgaataatgcatctatctaatgctctcaataataatcaaaagctaatatacatgtactcacttattcaaataaatatatatggattctttatccacttattggaacttactatgtgccagacactcttgtaggcactgcagattcagttgtgaacaaaggaggcaaagccctgcctcatggagcttacctattcctacatgatacaataacagataataatgatctcattgaaagaaagcacacatgggataagaaatagagggtggcgggaaaggactgggtgctaatttaggtaggaatgtcaggaagtcagaagaaaatgtaaaagtgtgggcatgagccatgtaaagacatccagaaaagtgttccaggcagagggaagagcaagagttcttatattctgccagaccctatgctgaaagcttcgtacaaattatctcatttaatcctcacaaaccccctgagggtaagtgtcattatttcttcattttgctgctaagcatttgaaccttgaagtaacttgcttaggagcacacgattttctaatgagggaggcatgagttaaactgagccttctggctctgagataacatccccacctcaactactaaacagttccatgctttggtcagtctgcaacaacctctttgccagcacttttaacacaagatttagagaatggctgattgctgagaaacaacatctgcaaagcctgcatcaccaatggatccacagggatagggcatttaaatgattgggtccccatgttcaccagatacggcactctagcaactgctgggatctcttgctgctatgactctccttcagctctgttagaggctgtgggaccagcatcccaggctcttcctccggacacccaagaaattctcccacatgacgtcagtttaagccaagcaagaattttccgtccctccattgcattatttgtaggaaatggctttattgtttttctgtatgcaaagataatataggctcattgcaaaaactatttagaaatagaaaaaataaaatcaccaccattgagagataactaataaaaagcctaccattaagagataactactaaacatcctgatatcagaattcatgtaatgtgtccacttaccgtggacattaaggctgtttccagttttttagaattataacatttttatgagtattatattattatgtgtgtatgtatatatatatatatatatatatatatatatatatatatctttatgccctcagacactgattttttttagaatgaattagtaacagtgtattatttgagcattcattttaaggtccttgctataaactgccaaatatccccaaagaaaaactgtagcaacttacactgcccctttcagtgcacaaaggtgccttttttcctgcatcctcagtaacacctccaacttttcactttcttttgaagcttctatcaccacaaaaacaaggatacagcctctgtcctagttgaatgtccccccacagagccttcgccatccccagcctgagcagagaagacacagaggagagtgtgtcatccctcagctcccccttggccttggggactggtcccatcagaaggtttattcagaggctgagggtacagtgaagacaggagacatcactgtggttctcagcttggaagactgcctcactctcacacccttttctttctttatacattcctccatcagctcctgcccttccatttatcatctatacttggagactcttagctcaggactcttctttgagcccagactcatgtattcagcattctctagatattaattccacttgtatgactcacagacatctcaaactcagcagcccaaaacaaagctcttcatctcctcttgccctctccacaccccttgccatcttccccttcctctaatgtgtcctactcactcagtagctccttcttcttcccaggagccagaggtccagaccctaggagcttttcctcatggctctcattcactctctatcccacagcccatcaatcagtcatgaaggcccatcaattcagtgtctcaaatatctctactatccaccccttttcaccccttccacagccaggaccccagtctaagccaataggtgactataattatctctacatggggatttattgaatgggagagaaaagaagaggaaaatagcatttcccaaacatttgtatatgcctgatgctgggatcttgttaatgctcattagatatacaataaacccatggagtagtaccatttcacagatgaggaaactgaggctcagagaggttaatctgcccagggttccataccagggagactatttggagccttatatgtgatgcttgctgtaccattctatagcaagagtgaagctagggggctggttcagtggcccttgtagtggtttgagtaagagggaactctcctcaatggtaagttcattgaggataaagagtgagtgtgaatttctttgtgtatcttgtaaggtttagctcagggcctgatcaagtcctgcctctgtcatttatcagagacaggagagtttagcagttaagggaatgaactctggaactggactgtctggattcaaaccccagctctgctaattactggctatggaaccttgagcaagttactcagctctctgtagtgggctaaacagtggcccccaaaaatatatgtccataccctgagtcctaaatcctgtgaatatgaatttatttgaaagagcctttgcagatctaattaagtaaaggatctcaagacgagaaggtcatcctggattaaccaggtgggccccaattctagcgacacagaggagagacagaagagaaaaggaccacatgaagaaggaggtagagtgaggcagccacaagctgaggagctgcagcagccacaagatgctagaagagacaagaagcagaatctcccctaaagcctctggagagagtgtggctctgccaataccttgatttcaaactttttccctccagagccatgagcacatttctgttgttttaaaccacagagtttatggtcatttgttatggaggccctagcaagtgaatatatttggtcaatgaaaagagtcaaactatgtaaaatatttgaagggatttattctgagccaaatatgagtgcccaatggcccacgatacatccttcaggaaaacctgagaacatgagcccaaggtggtcaggctacaacattttagggagacataagacattaatcaatacatgtaagatatacatcggttcagtctggaaaggtgagacaactagaagtggggtggggggcattgggatcatagatagattcaaaaattttctggttggcagtgggttgaaacagttaagttattgtctaaagacttggaatcaatagaaacgaatgcctggattaagatacggggttggtgagaccaagattttatcatgcagatgaagcatccaggcagcaggcgtcaaagaaaagatggcaaatgtttcttatcagacttgaagagtcttaaagtctatgttgatgttaatgctggtcagctgggcctgaatcccaaaagggaggagggtataatgaggcatgtctgactcccccttcctatcatagcctaaactagttttcttaggttaactttggaatgcccttggccaagaggaggaatccattcagatggtcagggggcttagaattttaatttcggtttacgattctgtatacctcaattttctcattcatacgtaagcttataatacttaccttgcagagctgtcatgagaattaagtgaatcaatatacataaggcactttacagtggtagctgtcacataatcggtgttttcaaagtagtgtttattatgaccctttaatagttgtgtgaccttagttatttttgagcctgtggtctttttcccttgaaaaagtaataacaaaaatacttagcctaactatagtatctcaaagtgggagtttgcctctttcacttaaaaacggtcaaagaattccttcaagcatcttctgacctatgaactgctaacattcaggtgtcaagtctcactgaagacaactcacaacccaccaaaggcagtgattgaaaagataccatgtgcccttgacccgacaaaatgctctggccaggacattaggtgctaggggatgtgggtccttttctctttctcctggctgccacctggtgtggccgggggagggagatgagaagcggagatgggggtgaagtgtggggcagatggcctctgactaataactgagctgggtcatttgtaatgatgacaaggcattacccaagagatgaggcaaaggtgtataattaatacacaagcagtccttaaaactctctctgaaaccctccttccattccttcccttgctaatgaagtcagagacagggtaaaagcctgtaattacacttgaagtaattagaacgctgtgaaatggaaagcttaagacaggaagctcaaactaatggaatacctattgctcttgttattctgactcatccttcctaggatggtgcttttgtaggtctccactggggagctgaagactgtactgaatttgcataaaatgtagacacacatgcacatcaccctttccttccccagagtggccaagaaagtgtcagcattgtgccttcctcagtttctacaacttttacctattaatgaaagaccaaatcagcagaacagattaatttaaaagcccttccaaagataatttttaaaaatctgagcattttatatttaaactttttttacatgcaattctccctttctagctcagtgcttctcaacatcaatgtgcctgcagagcacctgagggtctccttaaaatgcagatttggattcagtgggtctggggtggggctgagattctgcatttctaacaagctccccagccttgctgctgctgttggacgggggagtggtacacaatgtgagtagcaaggataaagtccttcttggtcccacaagtgacttcactttcctccacagcaatgattccaaacttctcatgtagagcttgaaaaatgaataaaaattttcaattgaagggaaagaagagcaagtgaggaggaagagtggaggaagaagggaaaagtgggtgggaaggtaggaagggagggagggagggagggagagagaatgtgtgtgagttcgtgtatgtgcatgatcaggtgtctcttcttataaggacaccagtccaatcagattggggccctacccttatgacctcatttgaccttaattatctccttaaagtttttatctccaaatacagtgactctgggggttacagcttcaatatgggatacacaatttcatccataacactaagtgaccttagatgaactccttaatttctctaagacttgattccttcatcccaattgcttggagacaagaaagagttaaatcattaaatgacaagaaatgatcattaaatgacatttcataaatgatcattaaatgacaagaaatgagttcatctaattagcattaagtgttccacatatcatctgtcacagaataagtgtcttggttgtgttcttccagacacagtcaagcattggaggataagtagattatttgtgaggtgaaggaaacagcaggagagaaaaaagagaagtgagatagcaaagagaaaacagccaataaaataaagggtgcattagttaacaaatcaccactgggagaaactggagcttcatttcactgggacaagtcaggcacccatattgaacaaacacccagtgtcagccctcactactgagacaaaagagccgagatatttatgtaccaaagaccatcagtcactggttgagatctgcttccaagggatgactacctccccacttccatcttgctgtgcttgtggatagtagccatggataccagaggaaactttcaggcaaagagatgcctgaattggctgttggaagccctaccagctctgcaagagggaggcctgggaagttctgggcagtttttccttgcctgctacagtgagagaccaggaaaccttagttctccgtagtggttggtcctagtaattgtactaggagtttgcaaaacactagagagactcctgtaccaaagaaatctcaggccaaacaagtgtaaggaatgcttgtttcatgggattcacaactaaagctctgttgaagtcctgtagttgaaatgttaaactttgtataatcctataaattccaaactcatttacaccaacactttttcaaataatatgtatttaccttttaaggaataaaagttctataatgcatgttttggggctatcaaattaaagctagctgagatttcactacattgtaagatgtttttaatctgtttctactcaccattgtagcctatgaacagtaactggtacctagaaagtattcaataaatatctgttattgtaactgttttaaagaatataaaaaaaattctgaaaatattttcaataaaaacagcctcatgaaaaatgactctctagttccaaaaatgactgtttcgaaagacttcggaataaagttcagctgaatataaacttgttgaaatactgagcagtttattctccttgctttgttcccacttaatgaaacagtgcatttttctaaaattgaagacccatgctgttagaagccattgtccactttgctagagaagaaccacttctccccagatccgtgggtggatgcagataagagggctaatggtactaaggcctctctggtccaaccttgctaaaaagagtatttcaacttctaaatcctccctctacacttcacccttttgttgaatactaaggtttgcacctgtgaccccatcatagggtataaagaatcaaattaaggaacttctgacaaatggatcccttttaaccttgatgtcaggcacaatttgctatttgttggcctcaaatgtcagctgaagccagggtgagagtccttgtgactctgactttctcatcttctgtcaagacctaaagcatttttgagctgggtgcagttgctacagctgcagcaaagtgtacatgataagtgggatttgcaacaaataggcttttctctacagatcactgctccagttgggcttctttgctatttttgcccaactgtcctgagaatagcaacatcaatggcaactcatttcttgtccatcattattacaatgaaaaattcaaaaccctgattattactcattccttggagctgagatggaaacctcgaggctgtaaaacaccacttgtatacccaaatgcccatttcctaagaagggatatttcctgggaaattgcttatcttcctagcatttgcaaaaggcaaaagctggcatacagtagcattttcttcattccctgcaaatggaacattggtatttctagataagttaagagtgaggagagagaactatggccatccaggttctcttgggattagtctcctttactcttccttgaataaagataatgtgaatcttgtaagacactgtctgtaaaatggtctacccacacctgctaatgcaatgagtgggctattatagggccgagagggttgttggggtctcctgacatcaggggagtaggtgaccaatgcggatgaatcacaatgacaatggacattagtatttctgagaccagatttgtttgggaaatgggatacattgcctttctttagtcagatgttgtcctggctactgcttacagatgacccttgttttgtcacttactcatgtgtcttccccacttcccttgctggaaaaaacgtgcagagaaactgtaagctccgtgaggttagacattgcatcagattttacttaccactctattcttagtgcctaccaccaagtctagcatacagtgggggccaaataaatatttgtagaatgaataaagcatctgtaacataatatgtactccttaagtgagagtttccattgctacattgctatcattgttgtcatcatcatcacaaacatgatcatgatcatggtcatcattaccaggtgatttttttacagaaatattttctcttcagattatagcagactgaacatcaagatctttaaatctgcttgtcctagggaagttctctggacttcttgcatttggcactagtagagacttggtattttcattgctgtaacacagacaaaaataaatgaaaatttcaaagaatgagtttacctcctggcctttcatggtgatctcctttcctgtctttctgtgaataatatgtgtacagtatcattgctctctgctaataaaaaattacttcaaaacttaaaaaaagtacttcaaaagcttaaaaaaccaaacatttgttatctcagttgctgtatgtcaggaatcagggtacagcttttctgagtcctcttcatatatttttgtctctgtgttactgcaatgaaaacaccaagtctctactagtgccaaatgcaagggtttctcatgaagctgcaatcaaggtgcagttatctcaaggctcaacttagaggagaatcttcttccaggcttacgctcctggctgttagccagagacttcagtttcttgccacatggtctgtctataggactactcacaatctgtcagctagcttcctccagagcaaaggctctgagagagagaaagaatgagagatagtggtaagatataagatataagatagtgataagagataagtcacagtcattttgtaacctattctcagaagtgatatcccatcacttttgtattattctattttttagaagcaagtcgctgggtccatcccacacttgaggggagaatattacacaatagcatgaatattatgaagataggatcattgtggaccatgttaaatagaagcttccagccacaatggatgatgttgttccctctaagcatgagtgtagcttcaacttggttcttttttttttcttaattgtactttaagttctagggtacatgtgcacaacatgcaggttggttacatatgtatacatgtgccatgttgatgtgctgcacccattaactcatcatttacattaggtatatctcctaatgctatccctcctccctccccccaccccacaacaggccccagtgtgtgatgttccccttcctgtgtccaagtgttctcattgttcaattcccacctatgagtgagaacatgcagtgtttggttttttgtccttgcgatagtttgctgagaatcatggtttccagcttcatccatgtccctacaaaggacatgaactcatccttttttatggctgcatagtattccatggtgtatatgtgccacattttcttaatccagtctatcattgatggacatttgggttggttccaagtctttgctattgtgaatagtgccacaataaacatacatgtgcatgtgtctttatagcagcatgatttataatcctttgggtatgtacccagtaatgggatggctgggtcaaatggtatttctagttctagaccttttagcccttttctcctttgagaatcatgggttgccaaccaatcatggcttcaatgccttgtcaaacttctctttcaaaaaaggaagaaagaggaaaaagagaatgggacaagttctgctaggaatagctttcagtatgatgatgattttagttgtcattgcgcaggtgcattggcattgaatcatgaagagaaccgcaattacttctattgacttgtctgagcatcaattttctgatgacttactttatgacttcctaatgaatatattaaaaatagaactctagaagttatatttagccctttagttcctttccctccctgcaccccatcccccactttgcctggaggcttaatgatatatttgagatcattttgaaactttatctactttgtcttaacatacatgtttaaagttgtctgtctaattttaatatacatccttcatcaacaattaagccacctcccaattgactgcattatctgtaattcttcactcactaactctctcatatcacacaccataagaagaaagagaaaagggaataacctatattaggagaggctcattgacaaaccctgaaatataaattgacacaaacgtgaatgcagagttttgtaaaaaaaaaaaaaaaaaaaaaaggtttaaaaaatagatctacagttaaatgactagtatctctaccttttgttaccttttgtttccttttttgcagattgtttcccagagaaagctgtccaaatccttgctgaagcatgggaacacagcagggaaatcttccatcacggtaagcaggcactccctaagcagctgtctgcctgagtggagagcctgggcggactggccagcccaaaccagacacttgggaagcagactttctgatattgggagttggtgccacaactactgaactattgaaatcactcccttatttttctttctttctcttttctgacaatacaattttgatccttctaactctaggaaaaataaaaaaggaaaagcatttgaaagtaaggttatttaattctagtaagcacttctgcaattgcaagatagattttagtggaggagaaagatgtagttgttgagcacagtgagattacggaattgtctagcattttcacacaatcaaagcttcaaagctacgtgtcctcgtctctcatttattttgagaattaaaattttgctttgatagcatttacttcaaggtttggtttgtttcctgacaaacaaagagctcagcatttaacactcctctttgatataatagtttggaggtttactgtgtgattcagtagccactagccacatgtgattatttaaattttaataaaactatttaaaattaaagtaaatattcagttccttaatcacactggccacatatccagtgctcaatagttacaagtggttagcagctaccatatgggacagtgtagattataaaacatttctataattgcagaatgttctattgggtaatgctagaagtatttctaaataagagcttacatttttgaatggaatgcctggtatttgaaagttcgacatcttctattaagagaccttgaaaaaggtagaggatgttgtccaaccatttggatgtatggagtgaaaaaagaaacaaacaaaaagacaagcaaaagaaacaaggtagaaaaaactacaaggaaattctgaattgctagagaggcaaattgccagaaaacgaacctcttgagttattttgaacattcctttttaactagagagaaaccaattttttttttttttttttttttttgagacagtgtctcagcctgtcacccagactggagtgcaatggcacgatatcggcacactacaacctccacctcctgggttcaaatgattctcctgcctcagcctcccaagtagctgggattacaggtgcccaccaccacacccagctaatttttgtatttttagtagagatggagtttcactatgttggccaggttggtctccaactccttaccttgtgatccgcccccctcggcttcccaaagtgctgggattacaggtgtgagccactgcaccctgccctgatttttttttttttttttaagcacaggaaaaattcaaaagagctgtcagtgaaagttgtggccattctcacaagaacttacctgagtttgttgcttgaatattttaaatgacactgtcatgttaaagctttttcttgactgccatcttcagtcatgaatcaaagtgttctttgaagacactgatggtgctctgaaaagctatggacccacgggttcactcccaaagcccacaaaaccagtagatccaggtatgaatttgctatggttctttctcaaaagaacaaaatctcatcttgccatattttctctgagatatcctgagattttctttctccacatatccaagaaaagtttgatctttttcttttctttcttttttttttttttttttttgagacagagccttgcccctctcccaggctggagcacagtggcacgatctcatctcactacaagttccacctcccgggttcacgctattctcctgcctcagcctcccgagtagctgggactacaggcgcccaccaccacacctgtctaattttttttgtatttttttagtacagatggggtttcgccatgttagccaggatggtctcgatctcctgacctcgtgatccgcccgcctcacctcccaaagtgctgggattacaggcatgagccactgcccctggccccatttaattttaagtatttaaatgctcctcaactttgagtctttagatcaaaacattggctttaatagcttctagaaaacacttgaaaaggtgcatgaaattttctaggtctctgcagatggtgaaaatcataactttcatcagttttccaaaggtgtctgtgatcacaaaatacttaagggtcagtaatcaaatgaagtataagaggcattaaggtggtaagggacaaaagagaaccaaatgaaaaatacaaatatgatagttcttgggttatcaaccagttctagagtttttcctatatacctggactcacaatctctactctcagttgttcacacatttttgggtctatctgtcttaaggtagccatcttagctttaagattaagtgtaaataatttaaattttccaaaatatttggaatattaccagtgactattgaaagtatatggacccaactcataatggaattgttgagctcagatagaaaagaggtaaaactgaattatcagtatcttgatataagcaatttgataagcgtatccatgtgctgtggccacagaatacatggtaaatcctaacattatttataaaggttttaacttatctgcaacttgactggcttctagatttttgttgcttttgttgtcattatttttctcctgactttctccaccaatttctgctccaaggctttgttgagagtcactaactattaagtattggaaaatgacctattatgagaaagtcttttggacagtaatttcttcacttataccaaaatctttgtcaggaatggtctgtacttgggtgttagggcttaaatccttacgtatacccatatcttcatctcagaaaacccagggacagtcttttgaaaaataggaattagaaaaatttgacataaaaactagtttattccaacatttcttgttggtctcactcaaaaagaaatattgctgtttttccttctctgtaatttaccaaagggagacattgtagttaattatagaaatactatccaatgccatgtgacctttaaagaaagaagctcttccaaactgctcttctattttttccttcagcttgggtcccatctcttatgttctcttgctcagtataaatggtgtctagttatttaccattgtctattccagggagttcccttgaatacctagaattgctgtgctgtagtcactagggttgtggaaaaactctttgcccaacatttgtctttgttgagttttgaaccaaacaggaactaaatttgctcatgggttctggagctaaggagttcaccctctattgcagctgatgtgtgctttttcctttaggtgattgctgaagaattatctggcaatgacgactatgttgagcttgcattcaatgcacggaaattggatgacaaggtaaagcgtttggcattaaccttattgaaggaagtaacaaagctagcacacagtttaatcagatttccccctgcaactatttttccctttccacccacattatcaaacagatccaaaaattcagagaggtctacaaagtaaactttcccccacattaaagatcaattaatgagaaagggaagggactgtaattaaaacaggacaattctatgacaccaagactgtttccaaatgccaccggtgagatgtgcacaggtaaatatgatttaaccccatttctagggacattctaagggagaggagaagatatgaaagggaagaaaaatgacatttattgagcacctatgtttgccaagtacaggtttaagagctttttatgtggtatcacatttattcatttgtacaactcctatttatcgcgtattaatagtcagcccacttatgcattcactggttcactcttttatttgttaatttgttcattcattcatcattcattttccaaacctttgttgggtgcttgttatgcatgaggtgctggaaaaaaggcatatcaaaaatggacattccactctcacatctgcaacctggaattcatcattgaagtaaaacatacatctaaaaaacaaatgatatagtaataatatatccacaatagaatgtgataagtgatatataatagtgtgtcctggtaaggccaacttattctacctggggacatcaggaaatactttatccttataaactaattatatttggattttaaaagtgtcttgaatagattatatgaaaccatcacagactgctccattcttaacatgagcatgaactaggtgctgggaactgcagtgtgcatagatgtcagttgggagcaagcttttaacttcaccttttcacaactgttatgctccttctccttcatcatctccccaaatttcagaaaaactcacaaaacttctttatagtatcttccctggtgctattataagccactgggtcagtgtatagcagttttaagctacttgcttaatggcttataatggtttctctacacttagtatgctcttaagtacctctagtttgtcatctaactgatttatgttatagtaaaagggggcgggcttggaggtttgttggaccagttggctttgaagtgtttgagcagtttccctttagtcaaatgaacacttgctcatagaattgaaagagccccctgcagcacttacagtggttctaaatggctattcccaccattggctgtactgattgtccaggaccctggtcattgctgagcctgaatgccccagtgctggaaaccccagttccttcataatgtgactatgtcttgtccagatccttagtaattcagagaacaaatcagaggcctttgctccagtttggactggaagttaaatggtctcagatggaaagagggcaaagttgtagaatggaggagcaaaatgataacataaagatcatttcacacaacatcttcaggaaatgagggctcagcaaggtatgatgatttacccaaagacacaacactactgctctggttttctattgctgcatggtaaaccatctattctgtgtggtaaaccatcaaatctagcaacctaaatgaagaactattccgttatagctaatgattgtgagggtcagaaattcaatcagggttcagttgggcagttctgctgtctatgatgttgatgcaaatcactcagtggtactcagcttgtggatgagcttgtctggaggttctacactagctctacgcacatgcctcgcacatgagatggctgaatggctgggcttagctggaacagtctaccagagtgcctacttggtggtcctggggtagtcacacttcctttagagtatctggcttctcccagagaaagcatttcaagagaacaagggagatgctcggtggccttttctcaccccttcctggctttggaagtcatgcatcatcactgctgctgcattcttttagttgcaagtaagtcataaggccagcccagattctaggactccacatcgtgttagggcagtggcaaaatcatactggagaaaaagcatgtggactatgaacttgtggtggtcatgtttacaaaatgcaaactgccacaatatttttgtgatagaaatagaataaaataatataattatttcatgtcacagctggaaaaatagttcccagatgctctcaaggaggacccttttctagcttttagcattaaacaattttataactatctacatgtttgcagttaaaacttactgtatctagttattgtatgactaaaagtcactataaaataaacaatgctcctaattttttattatgttaatgaatatcatgaaagtcactagtttctacatacacttaaaaattgaagtatgaatatgtaggaaaaatatgctatatccaattcagacggtggttgtaggatgcctgcctggatctccagtcccttggcagtaactctggtagcccccaggagtctacatactttaggtagaaagccactgtctaatccaactgccttattttatagatgaaaattttaaagtttagagatgtggcatgacttactgaaagccacacaggcacacactcacaaaaaaatcagtgcaagagagggactcaaacagattgcctgacaaaatctaagtcttttggagcagagagttaatgaatagaaggtggtttggtctcagaatatggaagacttggaaatgttttcatgtatttcagggaagtaggaagccaggaagaggggaggtaagaggggaggtaagaggggaggtcaggcagcagtcctccaagtgtgatgcatggtcccaatacctttgcaggggaacccatgaagtcaatactattttcataataatgccaagacataattttctttattcactctcattatctcacacatgtaaagtggagttttccagaggctgcatgatgcctaatatcacaacagattgaatacagcacaaatataaggattctgctgcattctattaagctaatcattaaattggtttgcaaaaatgtaaactaataccattctcaccattttttaagtttggaaaatataattataataatttttccattaaaatactatttttgttatgatgtagtaggtttattttattatttttaaacaatgtaaccaatattttaacaatttaacagttttataatatggtaaatattaatacatacaacaaaacaaaagctctttggtatccccaataacttttaagaatgtaaaggggtcttaagaccaaaagtttgagaacccctgttatagggtatatgggaaagcactaagtacttttgcaaaccacagtgacagagaaatgcaccattctttttgacagaaacagtcatttttaatttgtctttcaacagactagcaatcatctccacactcttcaatgagagtgagtacataaaatagcttaggtttgtgataaataacttatttatctaatgttaatgcaattcacttagtagagaaagggactttctaacttgtaaagcacatttgttacattagcaactagtcggcaattaatctaacaagtaagtagagacagaaatgtaataatcactttggaacattcaagctgacaaaggattctttcttttcccattcttgagaaagtattcatattggtgcattggaactaattccgacactggtggtctccacatatgtaatagtaatcattatagactgcattttcagtgttcccatgatgctagtttgatggggtgcaatataagtaaacaaatctgtctctaaagtagaggttggcaaactttttaataaagggctagttgataaatattttaggttttgcaggacacctgatctctgtccccactgctcagctctgcctttgaagcatgaaaacagccatagacaatacaaaaatgaatgagtgtggcagtgttccaataaaactttattcacaaaaacaaacagtaagccagatttggctcatgtgccatagtttgctgacccctactctaaaacaatgtaaaatctctacctgctgtgatgtgattttactatgtttaagtatgcctgcttgaaactgtaatctggtctgcattaatgatagaaaattataattattgagcatctattatgtgccaagtatcaggtgtctaacctacattatccccaaagctcataagcatattcccagaagttagtatctttatttccattttatagataaagcatactcagatcagacatttcccagagtcacaaaattaataagctgtacagactggatatgcctacatctttcagataatttcttctaggtccaatattccattttcaagatcaccgtcatgggtatgaactgcttcctaattgcttatcaccctcttacttagctaaatttcttttatattgaactaaaaaagcagaataatatggtctctgtgttattaaagaattttaccacagcaacacttcagtaaaatgccctattcattcatcttttttgaactgaactgtcccaatggccatcttagtgctaataatcaagttttaaaaagctgaaaattccaaattaaagtgaccacacaattagacccagagttgttgttttgaagctatgaatttctgagcgtacacttgagattttgaggtgcttatgaattatttcatttccatgaatcagatgccttcttaatagtaatcacccctgatatttgtacagttttttacaaaatgccttcatgaattttttcttctattgataatcatcatagtagcccactttttttttaatatttcaacttttattttagatgcagagattacatgtgcaggtttgttacatgagtatattgcatgacactgaggtttggagtacaattgatctcattacccatgtagtaagcataggacccaataggtagtttttcagcccttgctcccctccctctctcactgctctggtagtcaccatcgtccactgttcccatctttatgtccatgtgtacccaatgtttagctctcagaagtgagaacatgtggtatttgattttccattgccgtgctaagtcccttaggatcatggccttcagctgcaaccagggtgttacagaaaacattatttttttatggctgtgtagtattctatggtatataagtgccaaattttctttatcctattcaatgttgattggcacctagactgattatatgcccttgctattgtgaatactgctttgatgaacatacaagtgcatgtgtctttttggcaaaatgatttattttcctttgggtatataccagtaataggatggctgggttgaacggtagttctgttttaagctctttaagaaatctccaaactgctttccacagtggctgaactaatttacattcccacaaacagtatataagtgtttccttttccccacagcctcaccaacatctgttattttttgacgttttagtaataggtattctgactggtgcgagatggtatctcattgtggttttgatttgcatttctctcacaatcagtgacattgggcattttttcatatgtatgttgaccacttgcgggtcgtcttttgagaagtgtctgctcatgtcctttgcccaatttttaacgggtttatttatttatttttgcttattgaattgtttaagttccttataaattctgaatattagatctttgccagacaaatagtttgataatattttctcccactctatcagccacttgtttagtctgttaatagtttttttttttaactgtgcagaagctctttagtttaattaggtctcacttgtcaatgttctttgttacaatttgtttttgttgcttttgaggacttcgacataaattctttgccaaggccaacatccagaatgatatttcatatgttctcttctaggatttctataatttgaggtcttacatttaaagttttattcaatcttgaattaatttttgtatatggtgaaatgtaagggtcaagtttcagtcttctgcatattgctagccagttatcccagcattgtttattgaatagggagacatttcttcatttcttatttttgtcaactttgtcaaagaagagatggctgtaggtatgtggctttatttctggattctctatcctgttccattggtcttatgtgtctgtttttgtcccagtaccatgcttctttggttattgtagccttatagtatagtttgaagttgggtaatgtgatgcctctggctttgttctttttgcttaggattactttggcaattcaggctcttttttgttccatatgaattttacaatagctttttctaattctgtgaaaactatgtttatagtttgatgtaagtagcattgaatctgtagattgcttttggcagtatggccattttagcaatattgattcttccgatccatgagcatggaatgcttttccatttgtttgtgtcatctatgatttctttcaccagtgttttgtagttttccttgtagagatcttttacctctttggttagatgtattcctaggcatttcattttttctagctgttgtaaatggggtcgttcttgatggagctctcactttgtatagaaatgctactgatttttgcacattgactttgtattcggaaactttgctgaagatcagttctaggagtctttcaccatagtctttagggttttctaggtatagaattatatcaacggcaaagagagacaatttgacttcttttcctatttggatgccttttatttctttctcttgcttgagtgctctggcgaggacttttagtactatattgaacaggaatggtgagagttgacatgcttgtcttattcctgctcttaagcagaatgcttccagcttttgcccattcagtatgatgttggctgtgggtttgtcatagatggctcttattattttcacgtatgttccttcactgcctagtttgttgagggtttttatcatgaagggatgttggatcttatcaaaaccttttttcctacgtctattgagatgatcatatggtttttgatatgtgtacgttgaaccaaccttgcttcccaggaataaagtgtacttgattgtaatagattaaattttgttgtgccactggatttgggttgctagtattttgttgaggatttttgcagctaacattttttcagtcttcaccatgtaccaggcaatggactcaacacttcccatgcaccaggtcctctaattcttctttgtcactatgaggcaaaggttgatactccttccattatgaatggcaaactaagccttggagaaattaaatattttgtccacagttattcagattatatgtggtagagttgagatttgaaagcagtgctaaagccagtatgctgcgtatagattttcagctacctgaagacagaggccattcttgacctttctttcattgacattttagtatgccctcctgacaataacttcttgcctaattcattcatggtatttaaaaagaatgtgaaataaaatagaaaaagcattgtaatatacaacatgtaaatatgtatacaacaagcaaaagaaatagggtactaaattgtacatagatcatgattacaaaatttttaaaaagaagagaaaagtatatgtagagtctagaaaaagatttatcaaaattctattgatggttatggaattttgaattcagttatgggttcttttttccttctttttatttttgtcatctgttttctatatttttcatttttaaataaaagtgatggtaacaaaagttttaaattaacagtaaagagggaaaaaatgagaaagttcttacattgtggttagcagtttttaagtatgaatcataaaaacatcccctgagggaccaacaatctatttaaagaggcaaagcgtgaagttacaggaggagcccaagggcacgtaggaacaagctactgtagcccacatccatagggaaagggagaagagaaggaggttttaattttttaagatgcatgtagaaacagaaactggcctaaggggcaaatgagtaaatgcatagaggtgggaatcagctagaagtgcatctgagagagaaatgggccattttgggggagagacgatgtttgaagggcaagattatgatgaaagccaccattttggggtcttgacaagatgaaggctgtggtaatcttctgaaggcaccttcagaaatagagtagtagcggatgttccagactctgggtgttgtggagcatcttgtttggttcctggttgcatgggaaggaaagcaaagcggaagatagttattcccacctctcatctcctctttctaacatatactacaaagtttctagactggcattcttcactgcagagccaactatattacttttctgctcaaaatccttcaatgattccccctgcctctccaggccagtgcaaagacttcagatgagcatttaaggcccttcacatcatggggccaactttgccagcattgtctccaattcctcccctatgcttccctaggctatagtcttattaaattacttggggtatccccctctatgtctgtgaaaaattcatcagctcccctctcttccctcaatactccttataccttcattcattcattcactcattcactcatttatacctagccctaggttatatttatttgtatacttttcttaccagcaacctagatggtactttggaagactgagatcaggttctatctgtccttatatcttaacatcaagcacaaaaactctgtgatcagtatatgtcctacaaatattttgctgagctgaagactaggatggctggtaaagacattgatagtaaggcaaaatttagaagtagagaccaaacaaaggaaaataacgagtttgactctggcttgcttaacatttaggaataataaatgacttttaaggcaaatatgggcttaattctactttgctaaagtctagatttctggaaaaaaattacttggtgaaattcgtaataaaaatgtgatggtgatgaataaggtttttgctcagatagcctcctatcctataccaggtatccattcacttatttatgtatttattcattcattcaataaacactatgtactattaaaatctagacactatggaaaatgctgaggaaatagcagaaatataaaggaaaataaagtttctcctctttgagaatttataatctactgggggtaaaaatcaagtttttaaaagggatggagataggttccattcccaacaatgaagcacttatttattttacatcactctctcactaaaaacaaatataaacactagaaaagacacaagagacatgtatttgagagtcctgaggcagtgtagatttgaggggccaagaaactggacagaagagaaacccatggaggtgcttaagacattctgtgcagattttccactcaagggaattcctcaaggctgattcctaaaatagtgtggatagaaaggctgggaagcctagtttaaaaaaatagctactaagaaacagaaactgagcagagcttttggtggtctcatggggctggggagaaaaactgaagttcagggctattgagagagcaaaggataaagactcataggtgcatcagagaagacaagtagtccaacagtatgagtggcttatcatctcaaggcgtttgctaattagcaaaagcagcatagagagaaactgaacaaaaacctagagctaagaaattatgaaaataaacacagcatttgaggttctcacaaataaaaattggcattgaagacttgtcaaggaagaacacccctcgtgaacactcaggttttcagttagggtccttttaggactatacccaaggagtaaaggaaatcagaaatggataggggctttaaagacatttgaagaaattcatcctctaaatagcttaatcctaattggattcaggagacttctccccttataaccacttgctagaagctaaagactcatgtaaaaaccttcataatcttcattacacattgtctactatttaataaaaaattaacaagcataccaagaggtggaactaagaaagagataataaaaatagacctataggtgatccagacattgtagtcattacataggcattaaaataactataatgaacctgtttaagacaacagatacagtgattttcaaagaactggaatttgaactgatctttgaagaatactttgaatttcaactaaccaagtactgactttacaaagaacttagctttcagatgcagtccattctagccaagggtggatctcagggatgaggatcaaaggaagaaagggtggggcccatgatcacaggtaaagagaagagagtttgagtagaactgggcaggaagagaggacaagcatggcctcccttccacatataaaaaataggaaatcaagagggttttcctgttgattaaatattcctgattgatcaggactagatcaaatgcaggaggaaaaacaattcattgacgtttatctattttaggatttcttcagtaaatctgacccatttctggaaatttttcgtatgaatgatgatgcaactcagcagctggtgcaccgaactgaggtaagagtcatcttcagctatgccctcttatctcctaagatgatgataaattgacctattttgagaaactcctttttgtgtgtgtgtgtgtgtgttgaggtggagtctcgctgtgtcacccaggctggagtgcagtggcgcagtctcggctcactgcaaccgccacctcccagcttcaaacaattctctgcctcagcctcctgagtagctgggactacaggcacccaccaccacgccgagctaatttttgtatttttagtagagatggggtttcaccatcttggccaggctggtcttgaactcctgacctcatgatccacccgcctcggcctcccaaagtgctgggattacaggcgtgagccaccgcgcccagcctccttttacttcttaatgtctgtagatatcaactaaggcctgaaatcttcagtgtcctcaagaaggttctgccatttttagcttttttttttttcacttttaatcctcaatttagttgtcagaagagcctttctaaccccaatttctattgttaactttcaaaacagacaattagcaacttattcataataaaagtataaatactagctatcatttaatgaggatgtttaggcatctaggtgccaagcattagactgttatttacatgcataattttatttctcacaaaaattcctcacacatgatgatgatgatgatgacccccattttacagttgaagaaactgaactttaaggaggttaagtaactttcccaggtctcacagctaacaaaggatggaactcaggtttcaattgaggttgtttgactctgagcttcatggtaatttgggaagtcaatctgcttccccagggaaagtacatacattgcactgatgtcagtcctatcatatgaacacctgacctttcttagcagccacttagtctagttgtatctccttctcactcttcctcttctttctccaagtggccccaactttatctcttattaccttaccccctactacccactaccacacacacattcaacaactaaccacgatctccatttttcattttattttacttgtaagccagtccaagagggattttgtaggagtgaggtacattgataagaaggaagtgatatacttgtgctgaattacttggagctgagagaagacccagttatgcttgcataccatttgcagagtgaaaataaaaaagaaacccccatgactttcataaggtggtggtgtggttgctatatccccaaaacatcacattggaaattcaatttcctgaagtgacagagttgcaggtgttgttaggggaatgtttcatgtcattgttatgatagacaaaaattaaatagccttggatgggctagctgtggatatcatctgatacaaagttgatatctaaaaaaagtgtttaataaaagaataaataaataaatgctgttaaatataaatagtatgtctattgcatgctatagaacaatgtaattctttggaacttaatccatgaagaataaattgaggtgcagctagcacagttgccctgagtggcatctcattaccaccaccaaaagaggtctttcacccgttaagtttccttatgtgaaacaaacttcttttgagggaaatagagcaagatggccaaatagaagcctccactaatcatcctctaattatcctacccataagaacaccaaattaaacaactctccacacacacacaaaaagcactttcataagaaccaaacatcaggtgaatgaccacagtacttggttttaacatcgttatcactgagagagacactgaagagggtaggaaagacagtcttgaattgttgatactactcctccctcatccgcttggtagtggctgtgtggtgcagatacagaatctgtgtgcttggggaagagacagtgattatgggaccttgcactggaactcagtgctgccccatcacagcagaaagcaatactgggcataactcatcctgcacccatggaggaagaatttaaaccagtcctagccagagggaatcactcacatcagtagtagaaacctgagttctggcaatctttgccactgcaggctgaagggctctggggtcctaaataaatttgaaaggcactctaagccacaaatactgcaattcctgggcaagtactggtgctctgctggactcatagccagtgggctatgagggtatacaacctagtgagacaccagccaaagtcaccaagggaatgcctgcaccacccctcaggtgcatgcaccaccaaggaatgcgtgccccataccctaagcagtgcagcacatggctccaggagacactcctccctcccacttgaggagaggagaggaaagcataaatataactttgtcttgcaacttggataccatctcagccacaatagaatagggcaccaggcagagtcctgaggtccccattccaggccgtagctccgagacgacatttctagacaaaccctgggccaaaaggaagcctactgccttgaagggaagcaggatccattaccttctgaataaaaatctcttggtccccaaataatcagcagttgtagccaggctgtactcaccatgggccttgggtgaaacacagagacatggtggctttagatgtgatgcagtgcattcccagctatggtggctattgggagatattctgcttgagcaaaggacagggacaagtagaggggacttgattttgcaacttaggtaccagctcagccacagtgagatagagcagcaattgggctcttggggtccccgattaaagactttggctcttgcacagcatttctggactggctttgggtaagagaggagtccacttccctgaagagagagtcctatgcctgggagcattcaccacaagctgactagtgaatatttgggccttgagtgaacgttggtggtaggcaggcagtacttgctgtggtcctagggtggtggtggccaagggagaggctcctctgcttgtggaaaggggagggaagagtgggaaaaactttgtcttatggcttgggtactagctcaaacacagtagaatagagcatgaggtagagtcctaaggtttccgactccaagctctggctcccagatggcatttctggacctgcctgggactgggaggaactcactaacctgaagggaaggacatagcctggctgactttgccatctcctgattgtagagtactagagccttgtgtgaacataggtagtagccaagcacggttatcctaggccttgggtgagactcagtgctatgctggcttcacatctgacccagtgcagtccagtggtggcagccacagtggtgctcgtgtcaccccacctttaactccaggcagctcattacagacagactccattggtttgggagaaagtaaaggaagaggagaagggtttccacctggtaatccagggaattcttccagatcttatccaagaccaccactgtacctctacaagtctgaaagagcccagcatcactgagcttgggatgccccctaatgcagatacagtcacagtgaccaaaaacagaccacgacacccaaatccctttgaatacctggaaagccttcccaagaaggatggtacaaacaagcccaggctgcaaagactacagtaaatatataaatcttcaatatccagatatactggtgaatatctacaagcatcaggaccattcatgaaaacatgccctcaacaaacaaactaaataaagcaccagagaccaatcctggaacaaaagagttatgtgacctttcagatagaggattcaaaatagctattttgaggaaacttgaggaaattcaagataacacagagaaggaattcagaagcctatcaaataaatttaacaaagagattgaaataattgtaagaaatcaagcagaaattctggagttgaaaaatgcaaatgacacactatataaggtatcaaattatcctaacagcagaattgatcaagcagaagaaagaattagcttgaagataggctatttgaaaacagaccatcagaagagataagagaaaaaagaatgtttaaaaatgaagcatgcctacaagatcaggaaaatagcctcaaaaggacaaatctaagagttattggccataaagtataaggagaaaaagagataagggtggaaagtttattcaaagggataataagagagaacttcccaaacttagaaaaagatatcaacattcaagtacaagaaggttatagaacaccaaacagatataacccaaataagatgacttcaagacagttaataatcaaacccccaaaggtctaaagaaaatatcctaaaaggaataagagaaaagaaaaacaaattacgtacaatacagctctaatacatctgacgcagaattctcagtagaaaccttaaagaccgggggagagtggtgtaacatatttaaagtgctgaaggaaaaaacttgtatcctagaatggcatatccagcaaaaatattcttaattatgaaagagaaataaagactttcctagacaaacaaaagctgagggatttcattaacaccagaactgtaaaggaagttcttcaatctgaaacaacacaacattaatgagcaataagaaatcatctgaaggttcaaaactcactggtaatagcaaatacacagaaaaacacagaatattataatgctctaattgtggtgtgtaaactaccaatattttgagtagaaagggtaaaagataaactggtcgcatgtttatagcagcacaatttgcaattgcaaaaatatggaaacagcccaaatgtctatcagtcaatgagtggataaagaaattgtggtatttatataccatggaatactacttagccataaaaaggaatgaattaatggcattcacagcaacctggatggaactggagattattattctaagtgaagtaactcaggaatggaaaaccaaatattatatgttctcacttacaggtggtagctaagctaagatacaaaggcataagaatgatgctatggactgtggggacgcaggggaaagggtgggagggggttgagcgataaaagactacaaactgagtgcagtgtatactgctcaggtgatgggtgcaccaaatctcacaaatcaccactaaagaacttactcatgtaaccaaataccacctgcccccaaaaacctatagaaataaaaaaattaaataaataaaatacatttctgtggggaaaagaagacataacactcccttagaaagaaagtataatgaaatacttttatttttctatttattttctttctatgaaaggaaattaaaaaatattaactacaacaacttttcaagacagagtcattaaaataatatataaacagaaacaaaaagttaaaaagctgggggacaaagttaaagtgtagtgtttttattaattttttctttgcttgtttgttagtttgtctgtttctttatgtaatcagtgttgagttgttgtcagttgaaaataatgggttttggtacgtagtcttcaaaagacacatctcacatgcaaggtctcttgacacatataggctcaaaataaagggatggaggaaaatttaccaagcaaaaggaaaaaaaaaaaaaagcaggggttgcaatcctagtttccaacaaaacagactttaaaccaacaaagatcaaaaaaggcaaagaaagccattacataatggtaaaagttttaattcagcaagaagagctaactatcctaaatatgtatgcacccaacataggagcaccctgattcatatagcaagtttttagagaccttcaaagagatttagacccccacacaataatagtgggagactttaacaccccacagacaatattaacaaattatcaagacagaaaattaacaaagatattcaggacctgaactcagcactggatcaaatggacctgatagatatctacagaactctccatgcaaaacaatagaatatacattcttctcaccaccacatggcacttactctaaaattaatcacataatctcaagcaaaatactcgtcagcaaatgagaaagcactgaaatcataaaaacagcttcttggaccacagcacaatcaaatcagaactcaagactaagaaatccactcaaaaccatacaattacataaaaattgaataacctgttcctgaatgattttggggtaaataatgaaattaaggcagaaatcagggagttctttgaaactaatgagcacaaagacacaacgtaccacaatctctgggacacagttaaagcagtattaagagggaaatttatagcactaaaatgcccaatcaaaaagctagaaagatctcaagttaacaacctaacatcacaactgaaagaacttgagaaccaagaccaaacaaatcccaaagctagcagaagacaagaaataaccaaaatcaaagctgaactgaaggagatagagagacaaaaaaccattcaaaagattgatgaatccaggagcaggtttttttttaataatattatagtagaccactagctatactaataaagaagaaaagggagaagattcaaataaacacaatcagagataataagagggatattaccactgaccccacagaactacaaacaaccatcagagaatgttataaacaccgctatgcacataaactaggaaatctagaagaaatgaataaattcctggacagatagatacactctctcaagacagaactaggaagaaatagaatctctgaacagaccaataacgagttttgaaatagaggcagtaataaatagcctaccaaccaaccaaagcccaggaccagacagattcaaagcttaattctaccagatacacaaaaaatagttggtaccattactactgaaactatttcaaaaaattggagggactcctccctaactcattctatggggccagcatcatcctgataacaaaagctggcacagacacaacaacaaaaaaagaaaacttcagcgtaatatccttgatgaacactgatgcaaaaatcttcagcaaaatactggcaaaccaaatccagcaacacatcaaaaagcttatccaccatgaggcttcatccccaggatgcaaggttggttcaatgtaggcaaatcaataaatgtgattcatcacataaacagaacaaaagacaaaaaccacaagattacctcaatagatgcagaaaaggctttcaacaacatttaacattccttaatgttaaaaactcccaataaactgtgtattgaaggaacatacctcaaaataataagagccatatatgacaaacccacagacaacatcatactgaatgggaaaaagctggaagtattccccttgaaaactgccacaaaacaaagatgccctctctcaccactcctattcaacataatattggaagttcttgacagagcaatcaggcgagagaaagaaataaagggcattcaaataggaagagaggaagtctaactatccctgtttgcagatgacatgatcctatatctagaaaaccccatcgtctcagcccgaaagcttcttaagctaataaacaacttcagtaaagtctcagaatacaaaatcaatgtgcaaaaattgctggcattcttatacaccaacaacaatcaagccaagagccaaatcatgaatgaactcccattcacaattgctactaaaaaaaaagagtgacatgcctagaaatacagctaacaaggaaactgaaagatctaccaagagaactacaaaccactactcaaagagatcagagatgacacaaagaaatggcaaattattccatgctcatgcataggaataatcagtatcattaaaatgggcatattcccaaagcaatttatacattcaatgctattcctattaatctaccactgacattcttcacagaactagaaaaatctattttaaaatttgtatgaaacccaaaaagagcccaaataaccaaggcaatccaaagcaaaaagaacaaagctggaggcatcacgctacctgatttcaaactatattacatggctacagtcaccaaaacagcatggtactggtataagaacagacacatagaccaatggaacagaatagagaactcagaaatatgaccacccaccttcaactatctgatcttcaacaaacctgacaaaaacaagcaatggggaaaggactccctattcaataaattgtgctgggataactggctagtcatatgcagaagattgaaactggaccccatctttacaccataaagaaaaattaactcaagatggattaaagactcaaatgtaaaacccaaaactataaaaaccctggaagacaacctaggcaataccatttaggacataagcatgggcaaagatttcataataaagatgccaaaagcaattgcaacaaaagcaaaaattgacaaatgggatctaattaaactaaagagctcctatgcagcaaaagaaactatcaacagagtaaacagacaacctagagaatgggagaaaatttttgcaaactatgcatctgaatgaggtctaatatccagcgtctataaggaacttaaacaaatttacaagaaaaaaactcattaaaaagtgggcaaaggtaccctgaaacttaaagtataataataataaataaataaataaaaaagtgggcaaagaacatgaacagacacctcttaaaagaagacatacatgtggccaacaatcatatgaaaaaaagctcaacatcattgatcattagagaaatgcaaattaaaaccacaatgagataccatctcacaccagtcagaatggctactataaaaagtaaaaaaaaaaacagatgccggagaggtagtggagaaaaaggaatgcttttacactgttggtgggagtgtaaattagttcaaccatcgtggaagacagtgtggtgattcctcaaaaacctcgagacagaactatcattcaacccaataatctcattactggatatatacccaaaggaatataagtcattgttataaacatacatgcacacgtatgttcactgcagcactattcacaataacaaaaacatggaatcaacccaaatgcccatcaattatagactggataaagaaaatgtggtacatatacaccacggaatactatgcagccataaaaaagaatgagatcatgtttttgcaaggacatggatggagctaggggccattattcttagtaaactaatgcatgaacagaagaccaaatacagcatgttctcacttataagtgggagctaaattatgagaacacacggacatatagagggaaacaacacacactggggcctatcagagggcagaaggtggtaggagggagagaagtaggaaaaataactattggatactaggcttaatacctgggtgatgaaataatctatacaaccaacccccattcaacgcatttacttatgtaacaaacctgcacatcctgcatatgtacccctgaaactagaagttaaaaataaataaataaaataatgggccagcctcagtggctcacacatgtaatcccaggactttggggggccaaagcaggcagatcacttgagaccaggagttggacaccagcctggccaacatggtaaaaccccatctctagtaaaaatacaaaaaatagccaggcattgtggtgtgtgcctgtaatcccagctactaggaaggaggctgaaggagcagaattgcttgaacctacgaggtggaggttgcagtgagctaaggttgtaccactgcattccagcctggacaacagaatgagactccatctcaaataataataataataataataataataataataataataataataataataataggttataacataatatttgcaagcctcatggtaacctcaaattgaaaaacaacagatacaccaaaaaaaacccaataaatttaaaaaaacataaaccagagaaaaattaccttcactataaggaacacaggaaggaaggaaagaagaagaaggaagagaagaccacaaaacaaccagaaaacaaaaaccctaatggcaggagtaaccccttacctatcgataataacattgaatgtaatgggactaaacactccaataaaaagacagggtttccgaatggataaaaacaagatccagtgatatttagactacaaaaaatacactttacctataaagagacagactaaaaataaaaggatggaaaaatatatcccatgcaaatagaaaccaaaaaagagaaggagtaactatacttacatcagacaaaatagatttcaagacaaaaacaatgaaaagagaaaaaaattatataatgatcaaggggttaattcagcgagagaatatagcagttgtaaatacatgtgcacccaatactgaagcactcagatatataaagaaaatattattagagctaaggagagagatagacctcaatacaataatagctggagacttcaacaccccattttcagcattggatagatcatccagtcagaaaatcaacaaagaaaccttggacttcatctacaccataggccaaatggacctaatagatatttacagaacatttcaactaatgactgcagaatatgcattcttctcttcagcacatggaccattctcaaggatagaccatgtatttgatcacaaaactactcttaaaatattcagaaaaactgaaataatatcaagtatcatatctgatgacaatggcataaaactagaaatcaataacaagagggattttggaaactgtacaaatacatggaaatcaagcaatatgctcctgaatgaccagtggatcaatgaagaaattaagaaggaaatgtaaacatttcttaaaacaaatgaatatgaaaataaaacataccaaaacctatggaatatatgaaaacagtacttaaaagaaagttgatagctacaaatgcctatatcagacaagtagataagtttcaaataaacaacctaaaatgtatctcaaagaaccagaaaaggaagagccaaaaaactccaaaattagtagaagaaactaaataataatgattatatcagaaataaatgaaatttaaatgaagaaaataataaaaaaatcaataaaacaaaaagttagttttttgaaaagataaagaaaattgataaaactttagccagattaagaaaaaaagacagaatacccaaataaataaaattaaatctgaagacattataacaaatactgcagaaaattagtggatcattgaggttactatgagcaactatatgccaataaattggaaaacctggaagaaatggataaactcttacacccatacaatctaccaagattgaaccataaagaaagccaaaacttgaacagatcaatatcaaataacaagatcaaagtcatgataaaatgtctcctggcaaagaaaagcctggaaactgatggcttcactgctgaattctaccaaacatattggtagaattttaaaaagaactaataccaatcctacctgaactattttaaaaaaggaggaaggaatacttccaaactcattctatgaggctagtattgccctgataccaaaaccatacaaagatacatcaaaaaaagaaaactacaggccaatatccctgatgaacattgatacaaaaatcctcattgaaatcctagcaaacttaattcaacaacacatgaaaaagatcatgcaccatgaccaagagggatttatcccagggatgcaagaatggtttaacatatgcaaatcaatcaatgtgatacatcataccaacagaatgaaggacaaaaatcatatgctcatttcaattaatactgaagaagcatttgatacaattcaacatcccttcatgataaaaaaaaatgcaaaaaactgagtatagaagaaacatacgtcaacacaacaaaagccatatacaacagcccacagctagtatcatgctgaattgggaaaaactgaaagcctttcctctaagatctggaaaaagacaaggatgcccactttcatcactgttattcaacatggaaatggaagtcctagctggagcaatcatagaagagaaagaaataaagggcattcaaattgaaaaggaagaagtcaatttatacttgtttgcagatgatataatcttatatttggaaaaacctaaagactctacaagaaaactgttagaactaataaactcagcaaagttgcagatacaaaatcaacataaaaaatcagtggcatttctatattccagcagcaatctgaaaaagaaatcatgaaaataatcccatttataatagctacaaataaaaggaattcacttaccaaaaaagtgaaagatctctacaatgaaaacagtaaaatattgatgaaagaaactgaagaggacacaatacaatggaaaaatagtccatgttcagggattagaaaaattaatattattaaaatgtgcatactacccaaagcaatctacagattcaatgcaatctttatcaaaataccaatgacattcttcacagaactagaaaacacaatcctaaaatttatatgaaactatgaaagacccagaatagccgaagctatcctaagcaaaaagaacaaaactggaggaatcacattacctgacttcaatttatactacaaagtgacagtaaacagcacggtactggcataaaaacagacacataaacccatggaacagaatagagaacccagaaacaaattcatacacatgcattgagttcatttttgacaaaggtgccaagaacagacattatggaaaggatagtctcttgaataaatggtgctgggaaaactggatatcaatatgtggaagaatgaaactagacccccatctcttaccatatacaaaaatcaaatcaaaatggattaaagacataaatttaagacttcgaactgtgaaaatactaaaagaaaacattagggaaactctctaagtcattggactgggtaaagatttcttgaataataccccacaagcacaagcaaccaaccaaaaatggacaaaggggatcacatcaagttaaaaaaaaattctgcactgcagaggaagcaataaaaaaagtgaagagaaaacccacagaatgagagaaaatatttgccaactatccatctgacagggggttaataaccaaaagatataaggagctcaaacaactctatgagaaaaaaaatctaataattcaatttggaaatgggcaaaagatatgaataaacatttctcaaaagaagacatacagatggcaaatagatatgtgaaaaggtgctcaacatcattgatcatcagagatatgcaaaaaaaaactgcaatgagatagcactcacctcagttaatattaacttttttggataaattcaaaaggccataataaatactggcaaggatgcggagaaaagggaactgtcatatactgttggtggaaatgtaaattagtataatcattgtggagaatagtttggaggttcctcaaaaaattaaaaatagaacaaccatatgacccagcaatcacactgctaggtatatacccaaaagaaaggaaatcagtatatacaggagatatctgccctcccatatttattgcagcactattcataatagctaagatttggaagcaacctacaagtctatcaatagatgaatgaataaagaaaatgtggcacatatacacagtggagtactattccgtactctaaaaagtacaaataaaattctgtcatttgtgacaacatggataaaactggaggtctttatattaagtaaaataagctaagtacagaaggacaaacttcacatgttctcacttatttgtgggagctaaatattaaatataaaaacaactgaactcatggagatagaaaatacaatgatggacagcagaggctgcgaagggtagtaggggaggagggaagtaataatggttaatgagtacaaaatatctagttagaatgaataagatctagtatttgacagaacaatatggtgactacagtcaacaataatttattacatattttataataaccaaaacagtataagtggaatgtttctaacataaaggataaattcttgaggtaacagcccaaaaaataaaaaattgaaaggatgactattgctgtacttttcttccagaacctcctctcctctgctcctgagagcattcttctcattgatattggtaaattctcctgttcccaagaatttctataatatccccttttactctaatggggaggtgctcctagagtttcacaaggaacatgatggcaaggttttccgatgagtgaagcaacatgacattgatttctcttgctttctcagtagatacaaaataaataccaggcaaaactgctcacttgtgggtagcctgcacgtacacacacacacacacacacacacacatgtgtacactcatacatacatacacataaagattttaacttcagaggaaatttctagttgctattgagtttttcaaaactgttgcatgagacttcttcactttttagcattttcatataaagttgggaaatttattttaacccaaacaattttttacctaattctccttcttgctatcattttaatcatcctaagtgtactagaacacatgacaaagtcacacagaaacattatttctccacttcaatgcattagaagaaatttaacaatgagtctaggatctagttatattaaggaatccggtggaagagggaatcacttataaaagaattatgttatttggatagataattaattaaaaaacaaattctaggtcgggtgctgtggctcacgcttgtaatcccagcactctgggaggccgaggtgggcggatcacccgaggtcagtagttcaagaccagcctgaccaacatggagaaaccctgtctctactaaaaatacaaaattagctgggtgtggtggcacatgcctgtaatcccagccacttgggaggctgatgcaggagaggttgtagtgagccaagattgcaccattgcactacagcctgggcaacaaaagcaaaaatccatctcaaaaaaaaaaaacaaaaaattccaagacttccactaactaaagacttcctaagtagaaaaatcaatatgacagaattccatttaactttatttgtatatcccctagagcagtggttctgaaactttgtgcctcagaatcacccaggagacccacctccagagtgtctgtcggtagttctgggtggggactagaaatttgtgtttttaagaagtttccaggtgatgcagctcctgctggtccaggaaccacactttgggaatccctgccctcaagtacacagtacaatgctaggcacagagcagctactcatacattctgaaccaaattgaattatttgaaccatagttatggcaagataagatttgactcatatagattcttaggccaggattagccaagtttgtgattagtaaagtggttttaaaagggttttcctatgttatagacatagtttataatcttaagatctgccttgtcacgcctttccaggatattgtaattgagttggtgataagctagtataagtatggtcctgggatttttcttctagaaacttctcttctgacttgcaatctgatgtgactcaaggtcacagattaccagaccatccaattatttagcagcagagttgtcttgctatacccttcaccccactaagagtctttacctttgctgaccccaagagaagagaatttatactgtaagactgacagtcctacagaactgagaattctctatcaatgggcaaaggcagccctatccttaatttcaactccttttgatatagaagggatcattctcagcatccacatgctggaaaatattattggcattattcatgaaacaacagccaggacagtgaccacaggagttctgtgcataatgacctgcttagtgggtacccttaaaagatttactacatcaagtttttattaaggcacctcttccaggctattgttcttttcataagcatcacaatggtttctcaagcagttttaatgtggaaatgtgaaaatgtcaagcatttctcccccactcaccactcctctctttcttttcccaggttgtgatgaataacttaagcccagcctggaaatcattcaaagtatctgtaaattctctatgcagcggagacccagaccgccggctaaaggtcagaaatctgtgtccaagaaatgtgattttttaaaaaaagtatttaatcttcctatttcttttcaaaataatattgacaaaccccaaattttctttacactgtacccaaccctctcatcttttagcatctcgatggaagaaacaagggctatttcttcttctagagccattgaagcttatatgaaagcccaaaatcaattccaattatgttatatcaagaggcaaaacccatgtcttctgaaagacaaaaccatggcaataaattcaggttataaatgagagttattaaaatgaaaatagtgtcatatcaattatctactgttatataacagaataatgcaaaatttagtagcttagaactagaagcatttatttagcttatgattctgagtactgacaagttgggatgaactaatctaggtgattcttctgttgatcttgcctggactttctcaggcatttgtggtcagctacccaagaggagggtggttctgcttctggaggttggctggctgtggtctggaatgagaggaggggtggggccatatggctctcatcatccccaggccagcttggactaacacacacagtgaacttagggttcgaagaatgcaagaacagagccccataagacctctttagggcctaggctcagaactcacacaggtcacttcctccacagtctaggtcaaagcaagtcacatggtcattacagatttaaaaggtaaggagatagactacatctcttggtggaagaagctccaaagtatcgtggccactttttcgatctatcacgaaggctttctgagcaccttgggaatgtaaaagttggaagaaaatatgcattcaaagtcaccaaaggaagacagtaggctgaacgccaggagcagatttcaggagatgtttttataggccatgctctggcctttcctctaccttgaaagtctagacgttccttgttgtcaatggcccggaggtgattcaaccaattaaggataactaagcaaatctactggagactggtgcctataaactaaaaggccaattgattaatgttcagtgaaaaacacaaccatcaagcagtaatatcagcttcaccagggcattttcttgtgggcaaaccacagagaagacaatcatcagaaggttgctgttattgcctgaaatcagaattgggtaactgagacagttaatggcttcagactctgaaaaccaggagtgcccacctccactgtccatcaggcagactaaacattcatgttgacttctcaggacaactaatcccctggaaagtgttagctgggtagctggacattgatgatgtttgccttagtagttttacattttcctcactacttttgccccacaaaccttctgacagatacaattttttgattcatcgatatgatctgtcaggttagaatcccatctgattggttaatcccaagctctttaaggttgctttatatgtctttgcttaaatccattctgtatgagctttgcagttgaactcttagcagacatgttcacttccatgttcttgaggagcaactcagagttgcacctggtatctctgtaagaactgagatatttcaagcctcaaccccactggaaaccttcaagccaaaatcaggattcctggctatttggcccttcatgtggaagctcctatgcagaatggccaagagctgtgacttcaggcataggatggcaattatcacttacacgttgagtagcaccctcctattcccagggaggtaaatgaccctctttggccagaaataaaataatacctcctttagccatatatctactttttatgaggagtcattaaactttttatgaggaggataaaaggagagggtcatctgtaattgaataaataaaaatgcagaaaaggaacactttgtggctttctgagtgctctgctgcctgtagagaaataagtaggaggtaaggaaatagatgattgattgatagatgatagaggagagaaagaaagaatgtgagaaggaagaatagaggaaaagaaggaaaaaaagaagaaaggaaagaaaaaggaaggaagggaggggggagagaaggatcagggtttctccacacgtgcactattgacgtttggattttcctgtggggagctgtcctgtgcctgtaggatccttaacagcaaccctagctactagatgccagtagcatttcacccccgtcacatacacactcacacaccctgctgcctgtgtcagtctgaaaatcaaaagtgtattcagacattgccaaatgttctctagagtgtaaaatcacttccagttaagaaccactggtatagtacatcaaacttattatacattagagtcacctgggagccttgttaaactcctcaagaacctatgaaaatgttttaatttctttcaaaatcagaagaagagaatgaacatgtaagattaactaaaatattctaatttttttttcttgcatcagaaagcaacgaactttttagggtccatgaaaatctgttgtgttaaaaggggcccatgaaggcaaaagtgccaatgaaagtcacactgtgttcctatcccaaacatcttgtcatctcatcagaaaatacttcagtatgtattgctaacattgctaacagataataaatctttccattaataaaactataaaacattattcttaagaatgctaactatacttccttaatgccaccaaatattctgccattgtttatgtttgccagagtctctcatttattaaacaattgtttctatttgtttaagtgaagatttaaacaaggtctaagcactgtatttgactgagatgtctctgaagcctcctttaatcagttcgttctcgctccccttttttttccccctgtaatttacttagtgaagaaaccaggctggtttgtcccatagcatttctcacattctgtgtttcctataaatgcatatttagaacttgatcagatttcagggtctgttttctggcaagaatgccccagtattattaacaatttatggattttttaaatatatttcagtgtttccatctatttcagttattataattcctttgaaatcttaagttgtcccatatttggccaataaaagcttcttcaagttggctcttgaattcttttgatataaacttagtaacgtccttgcttgataacgtccttgctttctggaatgaattcttgacctaaatcaattttgaaattttacaattctttttcttcattacatatgtatttctatggatgcagagccatattttaatgtctctcaaaatcattcctctccatagtatttaaggtctctgtggacctatagcccatggaacagtcaggttcatttgtttcattttgttttcaatttttagatattttttcaaatttaattttgccttataattatattaaatgtttacatggttccaaagtcaaaactgcaaaacagggaatattcagaaaagattaacttccattcctgtctcttctaccttttaccttcattttgtagcatattttgtatgctacgttttgtagcatattttaatacctggtacagctagccatacccacttccgtattccttgccttcttaagggttttcctggatattttacctgtttttttcattgagctttataaacaacttatctaataccagaaaaaaacccaaaacttgataatattttattgagattgcatttaacttgtgaattaggcagaattttctctttataatattgaatcttcctatcctagaatatggcatgtcttttcattcattcaagtctccttttgtgttttgcaggagtgcttaatattttttctcttattttctatgtacctcttagaacctctattgtttgcataaatgaaggtcattgaattttttcttaaactaatatttgttctcttattgtttatagtgattttcccattaactttttttctttttctcttttctttctgttttttgtttgtttgtttgtttgtttgtttgtttgtttttgagatggactcttgctctgttgcccaggctggattgcagtggcgcaatctaggctcactacaacctctgcctcccaggttcaagtgatttccctgccttggcctcctgagtagctatgattacaggcgtgtgccaccatacccagctaatttttatatttttagtagagacagggtttcaccatgttggccaggctggtctcaaacacctgacctcaagtgatctgcccaccatggtctcccaaagtgctgggattataggtgcccagcatgtttttttccaaatatgtaatcatactacttgaaaatggagatagtttttatccttacccctttttttcttctaataccctcaatgtgatagatggcagtggaggtagagggcctccttgtcttattcatgaacatagtagaaaattctatagtgtttccccattaattctggcagagattaatttttctgtagagacagagtcttgctatgttgcccaggctggtctcgaactcctgggctcaagcagtcctctccctcagccttctaaagtgctgggattacatgcgtgagccaatgcacctggctgggattcattttttaatgtaactctaaaggtatcagacactcagtgctttctcagccatgtctactgagccttaattacctatgatattcaatacaattaaataccttaaatattcagatcatatttttactagttatggtaacccaagagataacaccacaacatgctaaaatgtcttctgaactgcataaaggcattacactactactttctatggcatcctagacatgccatattctaggatagactcaatatatattatttctaaagcatattagagtttataaggcccttataaatatcataatttcatttacttctaaccacattgtgaggtaggttccattatcttcattttacagatgaggaaactgagactcaaaaacccatgttgttaaacatcaaattcaatgttgttttaatcagattgcactgcctctattttattgtattatacttattagaaaagaaatcatcctgataagcctatttcttgaccttttcaaccagaatgatttatttaccattatgctaatatttaacagaagatttgtctatatgtaacatttcataaggtctgagacactaaaggaaagtctctcaataaaactataacacaatgcttacttatcaatgtatgatttataagaaaataaattactctcccagaaatatgtacctcttagattctaggaaatatggcattaatcattttatttgatttgatcaacatattgttaatacccagaacatattctttaggaggcaatgttgatgttcagaatagattcttccagagagtgttcttagagaagaaaatggtgagagggtactatcagcaagtatttattcataacccaattatgcctagcactgtggaaaactgtcatgccagaacaatcttgacaaacaccatataagcaccctgagaccatttaatcacatgtattatggggccattttctatctctttctctaatttccaaaccacacaagtaacatggatactttcccctacacaaagttcatcaagcatcatcagagtatggttgataggagctatttgccttgaaggggaaaactaaggtgatagcaccagttgttctggatcaattcgcccccatgccttatgtaggagagaggcccaggttattaactgagcccatggtgcagtaaaggaaatggcagaagagaagaagaagcaggtccccaaagtcaaagtagaagggagtaagacccaggaacccactaaggggtgaaaggaggcccaaatacaagtctaaagcaacccctgaatgacatttcacccatgattcatctcgcttgttctttgcgccgtctatcttaggctgccatgcctggttgatttaaaacagccatgttcttgagttgccttctgacacccccaaagctggattcctggacaatcagaaaagtgctctgttaaatcagaatcccacactcagtggtcctggagtcttcattttaacaattttcataaacaatgctggtacaggccatttgccaaacacacattgagaaatactgtctttttttttcctttaagttttttactttattattttttttaatttacgtttttttactttaagttctaggatacatgtgcaaaatatgtaggtttgttatgtaggtatacacgggctatggtggtttgctgcatttatcaacccatcatctgggttttcagtcccacatgcattaggtatttgtcctgatgctctccctccccttgcctcccaccccctgacaggccccgatgtatgatgttcccctccctgtgtccatgtcttctcatttttccactccgacttatgagtgagaacatgtggtgtttggttttctattcatgtgttagtttgctgaggatgatggcttccagcttcatccatgtgcctgcaaaggacatgaactcattcttctttatggctgcatagtattccatggtgtatatgtgccacattttctttatccagtctatcattaatgggcatttgggttggttccaagtctttgctattataaatagtactgtgataaacatacgtgtgcatgtgtctttatagtagaatgatttataatcctttgggtatatacctgtaacaggattgctgggtcaaatggtatttctggttctagatccttgaggaatcaccacactgtcttccacaatggttgaactaatttacactcccaccaacagtgtaaaagtgttcctatttctccaagcctcaccagcatctgttgtttcccgactttttaataatcaacattctaactggtgtgagatggtatctcattgtggttttgatttgtatttctctaatgaccagtgatgatgagcttttcttcatatgttttttggctgcataaatgtcttctttggagaagtgcctgttcatatccttcacccagttttgatggggttgtttttttcttgtaaatttgtttaagttccttatagattccagatattagacctttgtcaaatggatagattgcaaaaagagaaatactgtctttctactgattctccaaacctagctgactcactacaggtaccacccttatgtagttcagcacggtttctgatgccttactgtgaggctgagtgtatatgtatatgtgtatgtgtatggatacattctgttcttcctcctataagaaatccttaacacctgttttttgattacatccaactattcatatctttcttatttcatgtgtgaccaggccatcttcaattgaaattgtattttctccacaaattcactgtctttgctttggcctctctgagccagactgacacactactgccaaatggatttgagtccactcatagagtttgcctcggaacttccccctttattcccagcctcatgtgactcttaacccctgggtccctacttgcctcttattttgcctctaatcttttagaattaattgcatgtttgttttctttctgtttcaagctgatttttttctagcaaaccttctagctcttactgcttggaaaggaaaagacaagttccaacccccagatctgaatccttggcattgatcccaattcagccccataattcccccaaacccatagaaagggctttaatcattagatatgaattacatcaacatttcacgattattggtgcaaaacacaggcagttggaattgaggagtccactgctatgttcagcattgttggaaacacctgcaacaaagaacctggcatttctaggcaactgaaagcaatttcaccgtcctctctatgtgccttatatttgtaacaggaaaaaaaaaatccttggatagctcatggtcctcttgagttttctggagatctggtcagattcaagtgctttctttatggccttctggactcaagagctgctgattttgtgcctgtcaatagttcagtctgcctaaatgtcctggaacttatctgattgcagactcatggaggtgtctctatattggatcagctatagcacaggaattcttgagtccacttaactaaatggcacccctgagtacagcaggctgcctctactgaaatcggaaatcaatactgcagcgtgaaaaagcagtagccagctcaaatagtgttaaatcatgcaggcttctgaattgagagaaaaactacatattctctcaactttaataattctttcttttcattaacattatcatcttatattacaggtgaggaaattaagaacctgtgttttcgcaaattgcttataattacagagcttagtttacacagctttagtttaaacctgggtctctcctgctctataatttctgctcttcagtatttaaaaaacagctaatatttactgagcacttaccaggtaccagacattgtgatgggcactttgattaaattttctcattgaactctgtaattgttctaggttaagcaatgctgcagtaacaaagagcccctgtgtaatagaagttaatttcttgctcacataacaatcaaaggtaaaacttttatatcaatgtttgcctctccttcatgaagtaatccagtaactcaggttgcttctatcttgtggctcatccatatcttagggacttatttttgtttggatccatcaggcaaaaggggaaaaaatatgaagaggcctctctctaaaagttttagctgaaaacaacatctagcattgctgcctatattccaatgggtagaactcagtcacatagccacagtaaatggcaagagaaaccaggaaatgtggcctagtaggatgcctagaaatagaaggaaacagatttttggtgaattggctggctcttccacagggagacactcttattatcctcattttgcaaatgggaaaactgagactaacaaagattaaataactagcctaaattcacagagctagtcagtggcattggaaggatcaagtctttatgactctggaacctaaactccataccagaacctaaagtccaataaaactttccgtgatgatggaaatattctgtatctgtactcttcaaaagagtagccactacccacatgtggccaaagcaattctttcccaacctctcctctctttctcttcaagcctccttcttattttcagtcctcccattctggtatcccatccccttttcttcaaaacacatcatccttcccatccaccaaggagaaaattctgccccttcatgtgtcaagcctatgatgctaatgggacccctcctctgcctagtctttagtgactccaaattggaagaaatgggctgttgtacaaatggggtcaacactaggtgcttcaatgtcaaaataactttttcattagtgaaaattagatctgatttccttactatctaaaaagagagcctaccttgccaaagcaagtgctagtttgcttgtttgtttccaagaaaccatataaactgatcttacattaaaaagaatcttgggagttagtgtttcagtggggaaaacagaaaagttctggacaaagatggtggtaatcgttgaaatacaatatgaatatacttaatgccacagagctgtaaatttaaaaataaatggcaaattttatgttatgtatcttttaccacaacaaaaattaaatttagaaaaagccttcttcctgttaacatgactttgaacctgctccttgtgaaacaactgcctgacattattgtactacagagtatttaatgcctgcctaaagctggcataccttacctataatggctcttgttctctcagcaatctgggatgagggtatggcagctcctaagcgattctttctgactcccaaattcctcccttttggaaacccttgcatgcaaagggtacagtccttccttgcccaaccattatgagggaagaggccaaaagagatggtacaacctggccaaactgttttattgaaaaaattgtccatggtcatgctctgtctttgatttttttaaaaaatgtttttgaaaaagtcatctttggaaaacactttgcaagtctaaaactaaaagtatcagatgaatgctattcagtgccctgatgaggtctctagttgaaagtaaagaggtagccctcttattatctggctggacatttccctactagagagaatgtccatctaaataagttgcaattgctgcaactggaagcagtttcctcacattatttaatccatctgcatccccttctgcactgaaaatggatagctaaccagctactgggaagatacttggggaaaactgggacgtggataaagttgcttaatgatgaagggaaggattattctgagtagaaattctgagaatcccccagtgcaattttgtgtcattattcaaattgacaggactcactactctgtttaaataatgctgtgttctggtaacactggttatgctggttgctcttacttgattgtttatttagtttaaaatatttttaatatgagttactctatagtttattccactactttgttcacacagaaactgaaaaagttgcctcaagatctcaattttcatttttgcacatttggaaatgttgtttttaacctagccttgtcaacaggaaggttttcacaaactggattgacatcccaagatgccttttcattgagtcagtttctgcagggcatccagcttctctcccacattttaaacattaaaccagaatgttgtttgaaaaagatgaaaacatcacaatccgcagccatcctgggctttttttctggaaagcattgtcagtagaatcatcaaataaaacatgaagagacctgtctcttaggaagaagatcagctttcataaagaaagagtccttgaagcaaagggaaatgaccctttcttagatgcttggcagaacaatcccataggccctccttctcaggagctggaggaggtatcagcatctcctcaaagatatggtgcctgtaagaccccacctgtctgcagtgtttatacttcccaaaaagattaaggaaggccaggaggactttgtgtggagcacacaaaacaaatatcaagaaagagcaaattgactgacctgataagaaacgaattattttctctctgagagtgtgtgaattgttctttcttgggaacctgagctcattgaaaatgagcataaatacttttggacaattccagtaaagagaagaaagttagaatgatcatcaatcccacatccacccccatgcaatttagagagaaaccaggtagagatggagagatgcctcctcatgttgcctacagaggccactcgtgctgcatggctccagtcagggtcccccgtctcactgggtctagtcttcagcttctttgctggtacaggaactcagctttgtccaatcactcagacttagtgggacctggaagaactgactcacggcaaaaggcagatgcataagccaggaggccaacatagtaatttacaaaaaacaaaaataaataaaatataaataaataaatttggcaagaactataattatcaagctccatacagggaacctctttcctgatacctgaatacttttgaagcagaattagcaaccaaaatatgttatttggtgagcatagaaaaatcaaggcaagggcacatgaggagtctggagagtgtttactctggtcagcagttgtgactgaaagactcaagagtctggaacatctgattaagttaataaggtgcttgatcttaaaaatatagataattcggccgggcacggtatctcacgcctgtaatcccagcactttggaaggccgaggcgggcagatcacgaggtcaggagattaagacaatcctagccaacatggcgaaaccccgtttctactaaacacacacacacacacacacacacacacacacacacacaaaattagctggacgtggtggcacgtgcctgtaatcccagctcctcgggaggctgaggcaggagaatctcttgaaccagtgagttggaggttgcagtgagtcgagatcacaccactgctctccagcctggcgacagagtgagactccctctcaaaaaaaaaaaaaaaaaaaaatacagataattctaggctttcatgtactcattaaagctgatctctgactcccaattcctgaggtgagccacagtatatcttgtcaatgtataattttcaaaaagttaaaagtatgactctcattgaactatcaaatgaatatgtatcaaaaattttattcaactcattaattgatgaggtaaccaataagaagataaaagttctccaagagcattttggataatttagtttacatagtctttttctttaaaaaggactaaaatttctagatacaaaattaattaatgtctttaggggcaataaaccataaacttcagggtcatctttacaccagaaggaaatcattgcatcatatacaagtttaacatgtataactttacagatcctgagccctcaattattaataataaatagtaaatagcagaaacaaataatggtaaattcttataggaaaatatatcatccttggatgggcctgttaaataatgattaagtatggcattgaaagggcttacggtcacactctcggacttgttttcaggttgtggataatttttcttaacaggctcaagtagctcctgagttcacatttctagaagatcctgatatatgcctgaaattcccacctgtccctctccattgcctccccatctctgaatagctggcatgttcttaacattcaggtgtcaactcaaaactgaagcactcagacttcgttgttcatacatacattcctccagttactcttcatctaatcaccatctccttcatggcacttaccaccatctgtgattacgttgtttatttgtttacatgtttatagtttgagtcctctactgaaatataagtgccaaggtccgtgggaaaggaactggcctatgtaattcacctctatatcctcagcccctaaaacagtgcttggcatatagtagattcttaataaatgtatgcttaaagaatgaatagatggatagatggattgatagatagatggatggatatatacacaagcccatagttacattagctcgataccattgatgacattgtaccagattttttgctatttggtctcaccttttaaagacccctagaaaaatacccctcttatctactcattcttatctccacatatatcgatgctagtgattaggttaattaggttaatgtttccatcacatcagttatgacctgggacacttcctttaatttaagacaagtctacattcatcatggaagctttctttcctcattgtcatgtctcagagaacttcccattgctactcatttgtcaccatattttctcctaacattttttttccttaaatttaaacatatctttccctccaccagccatagggagttagaagaaggaaaggaagggaagggaagagtctggaggataaagcagccaacagagaaaagcactccttcaggaatgaggggctggaatgcaagtcacaaaaaaaaaaaaaaaaaagaaacagtattgtggccacatctggttctcacagcatagcttttggaggggaaagaggcctaaaatcttagaaaaggaaggtaaagaaagtagccttgtggattttctaaatgtcaggtcctttttatttcactggcgtattttatggtttagtactttgcttctttgaacagttcctagaatagcaaggattaagtctagtactaaccatgataaatcctggtttacctttaagcaatgagatttttaatagaataaagtagaagagggatgtggggtgagtgagacaaacaaacaggattcaattaagtcttaaaatgggtgagaaaagaaagagcatcctttggattctgatcctcagaactttttctacaacctacttgtctccacccccctgccccccgacgtcggtttcatttcctgtggcaattaactttacttcaacattatgttgaccacacggcatgctttattgcaccggtatttaaaacctttcatgacagctatcccatgaaagagtaaaatcactaaatggacttgtcaggaagcattacctctagctcatctgccctgcagaccagctggccttcttcataagctctcttaccatgcaatcacccctgctactcccaataatcaaactgactcttgaaggcatatgatgtaacgaaccacaacagaccttaagacaaggtcagcatatgatctagaataatatcatcaaactttagcaacatcagaatctccaggaaggcttgttgaaacatacatcattgggtcctaaccccagagtctctgattcagtaggtctagggtggggcccaagacttgcatttctgacaagttcccagatgatgctgatgctgctggttcagagttcatgcgtaaagcatgattcatatagaagaaatagtcaagagacagtttcaacaatacatttccctcaattcacccatctcaaccttaaaatttctctatatctgcatccactgtttcttttttatgaaaacaagtttatctgcccactgcactccaattcaattactcaaagactctttcccagagtgttttaaggcaagaagaaagctttggagtcatctctcaatagttgcttcttaaattaacactattgacatttggagttggataattctatgcagtgggggactggactgggtattgtagtatggttagtgagcctctatccactagttgcaagtggcactgcccccttcagtggtaataaaaaaatatgtctctagaaactgccaaatcacccttgttgagaaccactactctagtcaattgtatctttactctctccttctttgttgggatttaagggtgaaaattcatcgcatgccttcctgagttggggccagttgagaaacaaaaacagaacttgaaaacatggccatcagaatataatttcactgttgctaaagctggccccagtgcacaagtaggaatgcttctcctgggagatgtttgggttgtgattaacaataggtgaatgaattctggctttaaactaacacagaaacagaaaaccaaatactgcatgttctcacttgtaagtggaagctaaatgatgagaacacgtggacacaaagaggggaacaacagacgctggggcctacctgagggtagagggtacaggagcagaaaaaaattaaaaaaaaatttggtactaggcttagtacctgggtgacaaaacaatctgtacaaaaatccccatgacacaagtttgcctatataacaacacacccatacccctcaacctaaaataaaagattaaaaaaaacaatagatgaggaagcccatagctaatcttaggtagggaaaaaaataaatgtataaataccaggtgggaccacagtggcaaaactaaggcagtggatctcaaccttggattcatattagaatcacctgaggagctttaaaaaccactggtacctagaccccacctcagaccagttaaatagaatttctgagtataaaggccaaaacatcagaaattttaaaaagcagccaaggtgattataatgtgcagtcaaagtaaagaaccaccgcttaacttaatagactgagaacattaaatcccttgttagatttttctttaaggtattaaggagacagcccctagtctgaaacaagatctctcagtgtttcttaagactttttcagtcacaaaattctgctgacgtgtaagttgcataaacataatagaaaggccatgaaatatttacaggcttcagagtaggcttcctacttcaagtgtctaagccaagaacttgaacgcatgtgcaaagacctggaagtttgtgattaataggctgaatgctgcagcattttaacgtgttggggaggagacctagggcaggaaaaaatatgacaaggttagtgaggtaaacagaacatttggatcatgttaaggagtcttaatttctatcctgagagcaatgggaggcactgagggcctctatgcagaggagtgatgtggtcatatttggatttctgggattaggactctgcctattttgtagaatttgaattgcatgagggcaaggctggaggcaggaggtctggttaaaagtcgtatcagtggccaggcgcggtggctcacgcctgtaatcccagcactttgggaggccgaggcgggcagatcacgaggtcagcagatcgagaccatcctggctatcatggtgaaaccccatctgtactaaaaaaaatacaaaaaaattagccaggcgtggtggcaagaacctctagtcccagctactcaggaggctgaggcaggagaacagagtgaaccgggaggcggagcttgcagtgagccgagatcgcaccactgcactccagcctggacagagcgagactccgtctcaaaaaaaaaaaaaaaaaaaaaaagaagtcctatcagtaatccatgtgagttaatttttaaacagggatgaccagaacttggtaccagatcacctttggatataaagagaggaagaggaaagacttaaccctgattcttctattggtcacgtggatgaaaaatggtaccataccttaaaatcagaccactgaaggagcaaaaggtttgggatgagaaagatgaattcagttttgtatttgctgagttgaaggcatctacagactatacagtgggcagttggcccaggattgtatcaaatttagcactggaagtcccacatctcaggaaaccacttagtcctgggtgaaccaggacagttggacaacatggcagttgcctacataagtttgattctcagagaagagaactcagcagggacataaatatgagttgtcagtaaatatatggcaagtgtgcgtgtgtacatgcatgtaagtgctcatgtgtgtgtatgactagaaggaaaaacaccaatctaataacagtatattcttctcagtggttaaatcataaagctatttattttttttaaattggcttttaattttctaacttaataatatatagtttaaaattcacacacacatttttaataagcatgccaatttgttatatttgctgagaactttctagttcctgtttaaaaattcaaaatggaaataattatttttaaaagtcctagagaggtttcccggtatgggcaagtgtattctacttttgtatagtgatattagacaacattaagaaatagactacagatcaatttggttagtacctggtgacaatctcctaaattccagtgtctacttaggcttaaagtaacctggcaataggaaagtcacttggtgatatgaactaaactgatagagaaggctgctgtccttctacgtttttattagctttctaaaatgagtttatcatatactaccttgctctgttgttcattctgcaaagacaacctacactacacagtaatcaagtatgtatttgagacttagcagccgcacctaatttctttggaaagcatatcggcaatgatttcatcagccatttattaaaacaagtaagctaaaaatgataacagcaatcctcaatctgagtaacgaagagagcatgggagaagcctatgtaagttctggatcctgtagaactgggtacaccggtgttgggatttgaagcccaggactccttagaatcatgtgatagagacctcaaggtattccaacaactttatcatcccagtgaaaaaaactgagaaccagagaggaaaaattacttccccgggaccacacagctcattagaagccagactaaaacttggatctggacttacagaagggaaaagagcattaagtcagtattgtgtacctactgtgtgccaggaactgtgccaggtactaccccacattccatcccctctgtccatacaacaaaattgcaaggttaacaaagaaggaaactgaaaatcagagagctgagtaagttcctgaatatttgcagacctcttgagggaagaacctgaagcccaggtctgtttaactctaaagtcctttctcctaagacttcctaaagccttgtgtttcttctgtcaggccacactaacttcctcaaaactaccattctgatatgtaggctaaatgaggaaacaggttcaattgatcttctaaggcaggagaaaaacaaaatagtagatgtgtttatctatcatcttcagtaatgaaaggaaaaaggaagagaagaaataccaacgactttcctgagatttaatatcacccaacacatttcaggtgaagtgcccttaggtgtggacagttgggaaaaagaggtctcgagggtttttctaagcttttaataaaagctcagagagccccatagtgtttaaaatatctcaggaggaccctgcatatatgtgggagaaattatgtatgggaagaaaggggaaggccctttgaaggattctttcttgcttttctgagtctgaagtcagaagtaataaaaactctcttttgcctttctgcctacattttataaactgtatctattttctaatgctttcctcaacattttctcttcagagcctcacctaggaaatagcacaggaattaatattctaattttacagatgaagaaagtgagacatagattaagtaactgacacaggatatcatggataactagcaaaggtgggaagagaaagtgggaaaaagagatgtggtttgaaatggtttaccattttttactatgcatttctatcaataaaagcacccttcaatgtaggcacattttactaattgcaagcatttactattatactaatatagtatgtatgttttaaattttatgcaataatagaatttttttttttttttttttttttttttgagacggagtcttgctctgtcccccaggctggagtgcagtggcgcgatctcggctcactgcaagctccgcctcccgggttcacgccattctcctgcctcagcctcccgagtagccgggactacaggcgcccaccaccacgcccggctaattttttgtatttttagtagagacggggtttcaccgtggtctcgatctcccgaccttgtgatccacccgcctcggcctcccagagtgctgggattacaagcgtgagccaccgcgcccggccgcaataatagaatttttaaaggctatggttaaaaaataatacagatgaaagtgcttatagtttcttccttcacctaaattatgatggtcacaccctagggtggcccctataactctcaccctctagtagtcatgtttttgtgtaattccctctccttgagcgtgggcaggatctgtaactctctaagcaatagatatggcaaaggtgatgggatatctttcttgtgattattttttatgtcatatatggttgtatggaagaggtgaagatgtaattaatatccctaatcacttgaattatatctaattaaagggcagttatactagtgggccttacctaatcagatatgccctttaaaagatggcctaggctttccctgaagtcagaaactccaagcaacagagactctgtctctcagcgtctgtcttctaagaaacaagccaccgtgaatagtacagccacaaattctgccaataacctgagggagcttgaaatcagatccttccctagtcaagcattcagatgaaaatgcagcctacctgacacctagatttcagccttgtgagatactaagcacacaacgcagccacggtgtaattgaactcctgacacacagaaagtgtgagataacaaatgggccttcttttaggccattattgtgtggtaaattattacacagcaatataaaactaatagaccaatagagggtcttttgtaccccttaggttttgcataccttatgcactcttttagccctttgcccacaagatctcgtttcatcttcctccaaaccctataagaattgatatttctgtaaccactttgggagtgaagtgacagactcagcaggcttaagtgacttgccccagctctcacagttagaagtgaaaggcaagagacttgaacgtcagcctggagattagaaagaataaagccagttcttctagcttccttttgttgttattgttgtgattgttgcatccaactggccctatagtgtgccacaacataaaactatttccacatggccgccctcccctgctggtgcctctcgtaataggaactagctttttctcctgggtttctgctaatttactgtcctgaattcttctacttcagcactgatgcattgtaggacctgtagctcttcagtgacaacagtgggttctgtgttccattgttacttacacacgagaagaatctgtgtgagaaccatctatcaggactgtaaagttacctgactataaagttctaacagttgactgcttcaatattaatggagcttgtcattctgagaagcaatttgatatgactttcctttcattctactgtggaacaaagtaccaaaagctgctgcttttcacaaataaatttttcacctgggcacagctatttgagtacctgttgttcatgtgtttccaggtctcaggtcttgcaaactcattactaaccaaacccagggacatagagttaaggaggaaaatgcttggtttccatgcttgccttgctggaggccattttcctctaataagaaagacttttgctgaactggaatgacaggaagacaggcaggacttttcttccacctacttacaggaattgggcttctgtgggcatggtccagagcttagtagcaccctccctgggcctcattttctttagtaatcaaatggagataatagtacctgcccttatttcatagcgttggttcattcacttattcactcattcattctacaaatcttagattgtctactgtattccaagatagccacatgaaaaaatttataatcaagaagcagagctggaattttcagaaccatgtcaatttcaaatatttaaactatttattctttaacaattataagtaattgctgaatatcttttaagtaccatctgtcttaattacattaaatatgtagtcattctttcagtcatatataaatcttctttcaagacctactgtctatgaagcaccatgctaggttcttaggatatggagatgaatatctctatcatcaggacattcaaagtgtaatggggaaggctgatgtccatgaataagcagataggtttttattatttatttatgtatttaattttgagacagggtcttgctctgttgcccaggctgaagtgctgtggcacaaccacagctcactgcagccttggcttcctgggctcaagcagtcctcccaccttcagcctcccaagtagctgggactacagatgcatgccatcacacctggctaatttttgtgttttttgtagagttaggatttcactatgtttctcaggctggccttgaactctgtgctcaagcagtttttcctcctctgcctctgaaaatgctgtgattccaggcataaaccactatgcccagccacacagacttattttaaattttaagtgaagaaatgatagggaatgaaaaatccttagagcacctatcctgggatgggggagaaaaatgatattgtcagagctgcatttctgatagttaatctggttctatggacttgaagaagagaagaaaaacagagtgctactgtggttcagacaagagatgaagaggcctgaaatgcagtcacattgaggataaaagagcaaaggagtcatttggagacttatttaagcaataaatttggtaggaaatgttattgcccagagaccaggtgggaaagggtaaaagggaaagtagagaatcaaaattcctctccagtttctattttgagtaattttttcccatcagccatgcagggtaggtttgttatcaccattttactcagagagcctcaagatcaagtaactagaaagatcaggaccaagattcaaacctaggccaactaactccaaagtccatgctttttgctaaaaatcaaacctcctctaggatcttcatatgaatctgacaatgtgcccctattcttagatccaaaaatctgttccctggacaattagatggggcaaaggtaaagaaaggacatggcaagattagagacggtggagggcaggcaaaaggtggaatctgataaccaggcttctcttccttccacgtcctacattcctttgccaatgctcttctccactagctggtacacagttcttggggttctcctggtaacttggtcctgtctgtagaaatcaacaaaggcagtttctacagtaacccttggcagtaagatttactgggatggctcacagcgtctccaggtattgagatatatcttatgtattctaaaaggaaaggcttaaaagatgacaatcaggaagcttcagttggctgcttgcttactagcatttctcaggctccgtctttcacttcagctctgatttgcaatatagaaccttctgcctggccaaagcagtatcttgacagtggataggagctattttacccctcagagttacctctgaatctgcacagtaactataagacagctgcaggcacagtagaatgcccctcttcccctatctctgctctgctccccaagactagaggctggtgattcagatggcagaatggtaccatctgtgagtaaatgctctgcatgatccacagtgatttccaaggtaacaaagatattccctagcagcaacagagcccagagatggtacctaactgtactcactggatgcctagaacttttcagagcttgtcctcatcctgacatgcttatgtatctctttttcttcaaccagctcatttgattcctagcattgttttttatttttaattttttgtggctatatagtaggtgtaaatatttatggggttcatgagatattttgttgcaggcatgcaatgtaatataagcacatcttgaagaatggggtatccatcccctcaaacatttaccctttgagttacaaacaatccaattacactctttattttagaatgtctgctgtgactgtcctcagcaggactctctctttctgaatttagccctgcaacatgtgttggaccttagaaacatgggggaggttttttgaggaggtttccagaggacagaattcaaccttgtgtttttctgctatatatagtgagcttttcctcactgtggtgagaaaactatatagttttctgctatatgtatgtgagtattttccctatatgtaggggaaaggatttcctttgtttcacagagtaggtcatttcaatgaaagttatgaaaacaggaaattatatttgtatattgattcattttacagaagaggaagaaaaaaatatgttgctctggaaggggaaaagaatcctttggcctaactcataattcttggtacattgtatgttttaaaagaaatgtaactagaactcttcagtatcctagaccagtatgaaatgacagattttctattattttccttctgtttgtgtatagtttgtcactttttttcagcagtttgtgtccttagtgaatcacagagtaagattctaagcactttctgaacaaagtaacccctgcattagaaattggatactatgcaacagttgaaaagcaaggcctttcatgcatagtttcttgagcctcctgagcctttctccaaggtcaaggtgagggctccactcacaattctgaaactcctctttgtgactttagacaaataaccttcctgtgcttaaactacattacctacaaagatggtaatgcctgcccctagccacttctcagttaccttttttcaggaagtgagaaagtctaaaaaggactttggatccctttaagggacctgttattttagaaatgcattattgggagtcagggccacataatcagggcagtcagatatttgccacaaaggctcttgagacttcaaagaataaaaaaatcaatgaattgcttactttatcaaaactctgtatttgaaactttggatcttttaaaatttatatggttatagttaaaatactttacttctctggacctccatcattaataaaatgggcataaaatagtacctgtcccatagagttgtaagaattaaaggaggaaatgaaaacaacacacttagcatataataaatagtcaaaatgcatggccaaagtgacctgtattagatgttatgatagataattaagatgttttgttggtgagacatcagatgaaatgaaacatacttgtgttctctgaggcaccagcccctcctgcagagagtcagtgtttccaagaaaaaaaaatggccaaacataaaagatgcagagatattatctgtaactagttataatgaggtcttcaaaaatatataactaactccagctctttgttctaaaggatgagtcccatttcaaggtaggtacgatgttagtctggacatcacagatggatagtggcaataacagcaatgtaattcaagacatcttgtatcctttcagtttgcagaaccatttcagtcttccaagtttttccggtttttcacttctaggcaacaatggtttggaacctccagcatctctgttggcagtaaattcctagttccagttcatcagaagctttttgcttgtgtgacattactcttggtctcctcttccttatctgaaaattttattgacctgcaattaaattatctacagttggaataattgcttgctgtttctctgcttctgaccactactggaaagccatttggactttagattgtgcccagctttccttcaccttccttgattatgctcctcttatgtacctgctaattttatctagagtccagagcattcttagaccttttccattcctgtaagtcccagaggatgacactgacttgcttgaggtcacagaatcaatcagttgcttagggtaagaggcaagatcttctcattcctaattctgtgatcttttcacttcttgtatgtatggccccttcttgtataagaataaatgtgattcatatctaaaatctggacatggaaaatggactaagctgaaaataactgttggcaaaaacataaagtagtatttttcaaaaggtaatccccctaaccagcagtgtcagcatcacatgggaacttgttagaaatgtaaattctcagccatgcctggtggctcacacctataatcccagcactttgggaggacaaggcaggcagatcatgaggtcaggtgatcaagaccatcctggttaacatggtgaaaccctgtctccaataaaaatacaaaaaactagtcaggcatggtggcgggcacctgtagtcccagctactcgggaggttgaggcaggagaatggcttgaacccgggagacagatcttgcagtgagccgagatcatgccactgcactccagcctgggtgacagagcgagactccatctcaaaaaaaaaaagaaatgtaaattctcagtcaagctccacctaagacctactaaagcagaaattcaagccctctgggtgatgcatgctaaagcttgagaaccaatggtacagactatgccaaaagtgtgtaccttaattacaaaaggctattaaatgggcactgtattagtccactctcgcgctgctatgaagaaataccaagactgggtgatttatatggaaagaggtttaattgagtcactgttctgcagggctggggaggcctcagaaaacttacaattgtggcggaaggagaggcaaataagtccttcttcacatggcggcagcaaggagaagtgccaagcaaagggagaaaagccccttataaaaccatcagatctcatgagaactcactcattatcatgagaacagcagcatggaggtaacagtccccatgattcaattatctcccaccaggtccctcccatgacacatggggattatggaaactacaattcaaaatgagatttgagtggcaacacagccaaactatatcattccaccactggccccttccaaatctcatgtcctcacatttcaaaacacaattatgcctttccaccagtcccccaacatcttagctcattgcagcatcaacccaaaaatccaagtccaaagtctcatctgatcccttttgcctatgagcctatgaaatcaaaagcaagttagttacttcctagatgcaatgagggtacaggcattgggtaaatacacccaatccaaatgggataaattggctaaaacaaaggggctaccagccccatgcaagtccaaaatccaaaagggcagtcattaaaccttaaagttccaaaatgatcccctttgactccatgactcacatccagataccttccaccagataccctaaattatctctctcaagtttgaagttccacagatctctatggcaagggcaaaatgccaccaaactcttcgctaaagcatagcagaaatcacctttattccagttcccaacaagttcctcatctccgtcagagaccacctcagcctggaattaattgtccatatccctatcaccattttggtcaaagccattcaacaagtctctaggaagtttcaaactttctcacatcttcctgtcttcttctgagccctccaaactgttccaatctctgcccgttttacccagttccaaagctgcttccacattttggggtatctttatagcagaaccccactctctgtagtaccaatttactatattagtccattctatgatgctatgaagaaataacctagacagggttatttataaaggaaagatgtttaattgactcacagttctgcagggctggggaggcctcaggaaacttacaattatgacagaaagggaagcaagcatgtccttcctcacatggcggcaaagggaagtgccaagcaaagggggaaaagccccttataaaaccatcggatatcataagaattttctcactattatgagaacagcagcatgggggtaactgcccccacgattcaattacctcccactgggtccttcccatgacatgtggggattatgggaactacaattcaagataacatttgagtggggaaactgccaaaccatatcagccattaatgcataaaattgtgttaggatttcacaagtagactttaattttaagtctattattttacctggaagacaaggtaagataataacttttcaaggtccaaggttttacttaaattagcagaagtgttcttagggctctgcagggcctggctgaaaaaaagagcacaaagtttaggggagatgctgccagaggcaggcaggtattcctcttgatggaacatttactctttactgtccaattcagctgacatcaaatttctctatagtcttacaccatgctgttttgcacatgtatattaccttcctggtctctggagatatttgaatattctgaacactatttagtctttttaaatttttttattttttatttcaataaattttgggggaacagctggcatttggttacatgaataaattctttagtggtgatttctgagattttggtgcatcaaccatcactcgagcagcatacactgtatccaatgtgtagtcttttattcctcgccacccctcaccctttcccccaagtccccaaagtccaatgtattattcttatgccttagcgccctcatagtttagctcccacatatgaatgagaacataggatgtttggttttccattcctgaattacttcacttcgaatgatagcctccaattccatccaggttgctgcgaatgccaatgttttgttccttgttatggctaagtagtattccatggtatatataaataccacaatttatccactggttgattgatgggtattggggctggttccatatttttgcaattgcgaattgtgctgctacaaacatgcatgtacaggtatcttttttgtataatgacttcttttcctctaggtaaatacctagtagtagaattgctagatcaaaaggatacttttagttctttaaggaatctccacaccgttttccagagtgattgtactagtttacattcccactatcagtgtaaaagtgttcccttttcattgcatccacaccaaaatcaatcaatttttatttttttatcatggccatttttgcagatgtgaggcggtattgcattgcattgttttgatttgcatttccctgatacttagtgatgttgagcatttttccatatgcttgggacccatttgtatatcttcttttgagaattgtctattcctgtccttagcctactttttgatgggattttttttttcttgctgatttgtttgagtactttgtagattttggatattagtcctttgtcagatgtatagattgtgaagatttttctcccactgtgggttgcttgtaactctgctggttatttcttttactgtgcagaagctttttggtttaattaagtcccatccatttatctttatttttgctgcatttgctcttgggttcttggtcatgaagtctttgcataagccaatgtctagaagggttttcccaatgttatcttctacagtcctcatggattcaggtcttagttttaagtctctgatccatcttgagttgatttttgtataaggtgagagacgaggatccaatttcattcttctgcatgtggcttgccaattatcccagcaccatttgttgaataaagtgtcctttccctgctttatgtttttgtttgctttgtcaaaggtcagttggctgtaaatatttggctttatttctgggttctctattctattccatgtgtctatgtgcctatttttatactagtaccatgcttttttggtgactatggccttatagtatactttgaacttgggtaatatgatgcctccagatttgttctttttgcttagccttgttttggctatgcaggctcctttttggttctatatgaattttaggattgttttttctagttctatgaagaatggtggttgtattttgatgggaattgcattgaatttgtggatcgcttttggcagtatggtcattttcacaatattgattctacccttccatgagcattggatgtgtttccatttgtttgtgtcatctatggtttatttcagcagtgttttgtagtttcccttgcagaagtctttcacatccttggttaggtatattcctaagtaatttattttattttattttttcagttattgtgaaaggggttgagttctttatttgattctcagcttggtcactgctggtgtatagcagagctactgatttgtatccattaattttgtgtcctgaaactttgccaaattcatttaccagttctgggagctttttggatgcatctatagggtttcctaggtatacaatcatatcatctgcaaacagtgacagtttgacttcctctttactgatttggatgccctttatttctttctcttgtctggttgctctggctaagacttccagtactttgttgaataaaagtggtgaaagtggacatccttgtcttgttccagttcccagggggaatgctttcaacttttccccattcagtataatgttggctgtggatttgtcatagatggcttttattaccttaagatgtgtcccttctatgctgcttttgccaagggttttaatcataaagggatactggattttgtcaaatgctttttatgcatctattgagataatcatgtaatttttgtttttaattctattcatgtggtgtatcacatttattgacttatgtatgttaaaccatctcatatccctggtatgaaacccacttgataatggtgaattatctttttttgatatgctattggatttggttcactagtattttgttgaagatttttgcatctatgttcatcagggatattggtctgtagtttcccttttttgttgtatccctccctggttttggtattagggcgatgctggcgtcatagaatgatttaggaaggattccttctttctctgtcttttgtaataacgtcaatagaattggtaccagttcttctttggatgtctgatagaattcaggtccaaatccatctggtcctggacttctttgttgacaattttttattaccatttcaatctcactgcttgctatggatctgttcagagattctatgtcatccgggtttaatctaggagggttgtatatttccaggaatttatccatctcctctagttttactaatttatgcatgtaaagatgttcatagtagccttgaatagttttgtatttctgtggtatcagttgtaacatctaccaatttttttctaattgagcttatttggatcttttttcttcttttcttggttaatctcgctaatggtccatcagttttatttatcttttcaaagaaccaactttttgtttcatttatcttttgtattttttgtttgttttagttttatttagttgtgctctgatcttccttatttattatcttctgctgggtttggatttcgattgttcttgtttctccagttccatgtgatgtgaccttagcttgtctatttgtgctctttcagactttttgatgtggcatttaatgctatgaactttcctcttagcactgcttttgctctatcccagaggttttgataggttgtgtcactattattgttcagttcaaggaattttttaatttccatattgatttcattgttgatcatttggaaacaggctatttaatttccacatatttgcatcgttttgagggttccttttggagttgagttccaattttattccattgtggtctgagagagtacttgatataattttgattttcttaaatttactgagacttgttttggggcctatcatatggtctatcttggagaatgttccatgtgctgataaatagaatgtatattctgcagttgttgggtagagtgttctgtaaatatctgttaagtacacttgttttagggtatagttaagtccattgtttctttgttgactttctgtcttgatgacctatctagcactgtcagtgcagtattaaagtcccccactatatgttgccatctgtctcatttcttaggtctagtatgagtaattgttttgtaactttgggagctccagtgttaggtgcatatatatttgggattgtgatatttgcctgttggactagtccttttatcattatactatcacctctttgtcttttttaactgctgctgctttcaagtttagctattcctgctcacttttggtgtccatttgcaaggaatatctttttccacccctttaccttaagtttatgtgagtccttctgtgttaggtgagtctcctgaagacagcagaaacttggttggtgaattcttatccattccggcattctgtatcttttaagtggaacatttaggccatttatattcaatattagtattgagatgtgaggtactattctattcatcatgctatttgtggcctgaataccttgtggtttttttttcattgtgttattgctatataggtcctgtgagaaatatgctttaaggagcttctattttggtgtatttcaaagatttgtttcaagatttagaactccctttgtagtttttgtagtgctgacttggtagtggcaaattagctcagcatttgtttgtctggaaaaggctgtatctttccttcatttattaagcttaatttcattggatacaaaattttggctgataatttttttctttaaggaggctaagaataggaccccaatcccttctagcttgtagggcttctgctgggaaatctgctcttaatctgataggctttcctttataggttacctgatgcttttgcctcacagttcttaatattctttccttcatcttgactttagataactggatgactgtgcctaggtgatgatctttttgtgatgaatttcccaggtgttgagtttcttgtatttggatgtatagatctctagcaaagctgggaaaatttttctcaattattccctcagatatgttttccaaacttttagatttctcttcttccttgggaacaccaattattcttaggtttggacatttaacatagtcccaaacttattggaggctttgttcattaacaaaattttttttctttgtctttgttggattgggttaatttgaaagtcttgtgtttgagctctgaaattcttccttctgctcatttgattctattgctgagacttaccagtgcattttgcattactctaagtatttcattgatttccagaagttgtggttgttttctatttatgctatctatttcactgaagaattttcctttcatatcctgtatcatgttttttatttctttaagttcgactttacctttctctggtgcctccttgattagcttgataatcaaccttctgaattctttatctggcaattcagagattttgccttggtttggatctgttgctgctaaactagtatgatcttttgggggtgttaaataaccttgttttgtcatattaccagaattgtttttctggttccttctcatttgggtagactatgtcagaggaaagatctgggattcaagggctgctgttcagattcttttgtcccactgggtgctcccttgatgtgctgttctcccttttcccctaggaatggagcttcctgagagctgaactgtagtgattgtttatgcttttctgggtctagccacccagcagagctactgggctctttactggtactgggaactgtctgcaaagagccctgtgatgtgattcatcttcaggtcttgcagccatggatactagcacctgctctggtggaggtagcaggggagagaagtggactctatcagggtccttagttgtgtttttgtttagtgcactggttttgtgttgattggcctccagccaggaggttgcgctttcaagagtgcatcagctgcggtcctatagggaggatgcaaacttgccctagggacacctggtcaagtattaaagtttctcaggtggtgtgcagggccacagagcttccaagagactatgacctttgtcttcagctaccacagaaggtagagaaagaccactaggtgggggcagggatagtagtgtctgagctcagcctctctttgggcagggcttgctgcagctgctgtgggtgatgggggtgtggttcccagtccattggagttatattcctagggggattatggctgcctctgctgagtcaaacaggtcaccagagaaatagaggaaagacagcagtcacaggcttcaccctgcttccatggagcctgcaatcctaaaggccggtctcacacttaccaagcaaccccgctcaacagcaccaagtctattttcaggcagtcagtgaccagggctaagaacttgccccagaccacaagcctccctgccaataagcaagcagagtcacagttttttggcatctcagggagcctgcagcagtgatccagttccttcaaagggtctgtggattctcttggctttactggtatgttcctgcagtagttctttttttttttttttgagacggagtctcgctctgtcgcccaggctggagtgcagtggcgggatctcggctcactgcaagctccgcctcccgggttcacgccattctcctgcctcagcctcccaagtagctgggactacaggcgcccgccactacgcccggctaattttttgtatttttagtagagacggggtttcaccgttttagccgggatggtctcgatctcctgacctcgtgatccgcccgcctcggcctcccaaagtgcctgcagtagttcttggagcaaaagttcacggtataagtctccatacactgcactgtctatgcaagcaggagctgcaagctagtcttgcctcctgtctgccatcttcatccctctcccctgtttggtctgtatgcaggatattagattgatgtgtctcagataatactgtgtagcagaattttcgtgatgtcctattctgcattcaacagaatgtttaatattggcacagtccaatagggctatcacaagacatgtgttgctattgagtacttgaaatatggctagtggaagcagaggaattgagtttttaattttatttaattttaatgaatttacatttaaagagctgcatgtggctagtggctaccctattagacagcataggaatagatatattgatctaatatcttacacaatgttgattaagtagaaaggtaattgtatacttttgaatagtatttagaaaacttagaaattgataaacctagaatagtctttttaaacattagtagggcacttttaggaccactccaaaagtgattatgtctaaatcatttattagaatagtgtgacaaagttaggagccttctgtttatgatgggtgttaagtcattctatgacccgcaggttttccgagactttttacaactgcagctcttagaaatctattttaagtgggaagaggttactgaacccaaatttgagaaaaatcgtggaaaatacaaatgctcttctacagaaatcatggaaaagcattccaaaaatcaaaatttatttttcatccttatgattgagccataagtcaccgatcaaagacctgtcataatcaagtttttcaaagggataagctataaatgaaataatttgaactttaaaagatcatatgtgactgcatctgagtaccatttgatgtgttattaatttattttttcagatgtttttaagtgtttggtaatttcctcgaccaaaaggaaagacactgaatccccccattttccacttaggatgatttcagcttatgaagtagtgacataagacctaggatagtctcttttaaaacataactaaaaattttttaagctttacagtttctcacatgaattctgaaagaacattgcttcaatttttaccttcttatcctctcatctcctttccagttatgagatattgtcagactcaagaatgagaatattgaaggtctggttaggttcaaggtggaagtaattatatttacccaatctaaagtattcatttcaagaatggaggtaagcaaataagaacagactatgaagttactggatattactggcctctaaactggagacctaggtttaattgtctctagaattattttgctggctgatgttctgcagaattggattgtgttgataaatgagtttgattacttactttcttcattgattctgacagctacacctgaagaaattattcaaagtgaagtattatttctaatctagatttcctatggataaagctttggcaaaatatttgccaatcttggcatttatgtattataaacttattaagtcagtgaatggatgctcagcatatgcagtttatatgactattaaatgtgtttccaatacctgaaggataagtatgcatgttgggagtgaagatacatttttatatcacacaaacagtaagataaagaataagagtatatttttattaaatgtaccaagggttgcagtataatctccaaaattaattgagatcaatatggctaaccatcccaatccccaaatatatcaaatgccttaagcatgtgcatttttttagctccacaattctattcttaaaaatttgttctatggaaataattatatatgttcatatttataaatgaaatggccaacataggtgagtagtaacaacaatagtagaacaatttaaataatgtaatcctcttcagcctttacaaataatattataaaacaatgattctaaataaagaagggaaaggggagtgaaccaaaatcatctgccaatttttttctttctttctcctttctttgggtttattctgttcttttttttaaaaataaaaaagttacattgaacatttggcttatcaatttttagcctttcttcataacgagtacaaatgtttcaggctttaaattttcattgatggctcacttttagccatatcacacaaattctaatacttatctttattgtcacttagttccaagtaatttttgtttccattattattaattatgtcttcacttatgagttacttagacagcagactttcaaaaaatttttagttagagattcagttgtttttaaaaaatcaatgtttttatttagtagtaatagtcacagaacatggtctgcctcatatgcttctttgacttttgagaccggctctttagtctagtcctaaccagaggtcaacttttataaagatttctgtgtgtttgagaagaataggtacttctaccttacaatgggtacctataatgtggtagggatgggggtggggtaaggaggtgaatgaaattttagagaggtaatgatggaagcaaagagaccagatagaaagctaattgcaataattcaggcaagaaatgatggtagaatggactagggaggtagtggtgaaaatgttgagatggaattagattctggatatattttgaaagtaaaaccaacaagatttcctgaaagatttgatgtggagtgcaggagagagaaatcttagcctgagcaactggaaggtagagatactattagctgagatggggaggactgcaggtggatcaagtttggggtagaagacccaaatgttaggcaccagaaatggagagttagagtagacagcagttcaggggaaaggtctggactggagagatacgggatcatctaggtcagtggttctccactggggtgcttggggcaagtgctatgggcatctagtgggtagacatcagtgatgcttctaaacaccttgtaatgttcaggatagtcccttaccacaaagaattataggaccgaaatgttaacagtaccaagactgagaaaacctgacctaaggcctgagcataagagaagaaaaggtgctcaaggactcagctttggggcatggcttagtaggagttcaaagagatgagaagtatctatcagataattctaaggtgtgtgtctagtaatactgggggaaaaaacaggatagtcttatgtcctgaaaggcaagtatttatagtatattaaggaggaggaattcatcagccttgtcaatgctgttgatagatcaacaaagatgaggactgaaaattgctctttgaatttaccattgtggggtaattgaaaagaccccatattaacaagagtaatttcaacagagtggtgttggcaaaagtctgacgctgttacttactgactgagtgacttagggcaaggtacttagcctctctgagttttagtttcctccctcataagctgaaggtaataatctacttcatagggttgcatgagataatgggaataatgaggcggagcacagtggctcatgcctgtaatcccagcactttaggaggccaaggtgggtgaatcacctgaggtcacgagttcgagaccagcctggccaacatggtgaaaccccgactctactgaaaatacaaaaattagccaggcatggtggtgcacgcctgtaatcccagctactcgggaggctgaggcaggagaatcacttgcgcccaggaggcggaggctgcagtgagccaagatcgtgcgcagtggtnnnnnnnnnnnnnnnnnnnntgcctcttgggctcaagcgattctcgtgcctcagcctccctccttgtgcctcagcctcccgagaagctgggactacagggtgccatggcactccacgcctgggcgacagacgtgagactctgtctcaaaaaaaaagaaaaaagaaaaaagtgttggggaggggggataattacgtgtaaagcacctatcacagaactggcacatagtaggccctcaaaaaatctaaaatctccttccacaactctcccattcatctccagtttctctcctcctgcaacccctcctacatttcccccacacaaaaactactacttcaatgttttatcaatactaaatactatttagtattataagaggcaattctctcattaaaatacactttgtgatggggaccatatttcaatgatcccttattattaactgaagaaaaagaaaaatgttaataatttccggttttccgtataaggtaatacattgaactgggagaaaaacaggtagcaatttaaaaatacagagtcacaaagtaatttctcattaaattaaatatttcattgttgaattgaattgtttattaagtcttttttcggtttgaaactgtgcaaacccaaaccagtagctccattttctaggcctactgaagttccctgtacctttcccacataaaactactatatacaaaactttcaatcaaaaccaaaaatccccggagagacatgtcaaaggatggggattggattggggaaagctaaagacatagaaaatttctctttaaaatgttttactctggaatttcaactggttttgtcttctcttgggattcagaaaatgattatattaactctaatgattttatggtgactttataaaaaatggatttaattttaaaaggtcaagggtagccatattctgagaaaaaagatatctgaaaatatgtcattctgcatgcaattgtaatttccacagaagtaaaggcctgggaggtcatccaagtaatgagatttcatgctaattccccagttagtcacacacagtgagctcacagtccaagtggcttcagacttctctcgaagctgaggtggctggagaggaattctccatgatttagaacttcagggtaccctgatgttgtcctaatcagcagcctgattctcctatctgctgagcccccaaagagaggtttttatctccctatctctacatctactatatttcattgagtctaagacacacattttattcatattcttcttatgtcttggaaatcaggtttcatcttataatctattgctattggtcagtctgtccagaagaacactttgtgtgatggaaatattctatatctgttccattcaatatggtcacccctagccacatatgtctcctgaggacttgaaatatggctggtgcaactaaagaggtcaatttttaattttattttattttcattgtttaaaatttaaatagccacatatgtctagtggtgggcctaatggacatcataggtgcaagtcaaattcttaaaggaaggatttaactttgtttcttccactcacttgagaaatgactaacttgagactcctttaaattaaattttctgtttgaggttttttcactgcaccagtagtgagttcagactgaggccctgagtacagtagttcccctttatctgtggtttctctttccagagtaccagttgccattggtcagccacagtctgaaaatgttacattactactcatgccctttggggctatgattaagtaaaataagttacttgtacaaaaacagtgtgatactgtgacagtagatctgatcatcaagatggccactaagggactagccggcaggtagaatagatggacaaagggaatgattcgtatcctgtgttgcaggacagcgtgagatttcatcatgctactcagaacacatgcaatttaaaacttacaaactgcttttttctggcatttttcattaaatcacaatgcctacatcattcacctcacttcttctcatcatatagcaattttatcatctcatatcatcacaagaagaaggatgagtacagtacaataagatattttgagagtaagggagagggagaaagagaaggaaagagggggagagagagagagagaacgagagagagaccacattcacaaatgcctattacaggcatacttcagagatgttgtgggtttggttccaaactactgcaataaagtgaatatcacaataaggagagtcacacagatttggggattttccagtgcaaataaaagttatatttacactattgaccaggcacagtggctcccacctgtaatcctagcactttgagatgccaaagcagtcagatgacttgaggccaggagttcgagaccagcctggccaacatggtaaaaccccatctctactaaaaatacaaaaattagccaagcgtggtggtgcatgcctgtaatcccagctacttgagagactgaagtatgagaattgcttgaacctgggaagcggagggtgcagtgagccaagatcacacccaccgcactccaacctaggcaacagagtgagactctgtgtcaaaaaaaagttatgtttacagtatcctgttctttattaagtgtgcaatagcattatgtctgaaaaaaaaagatgaacataccttaatttaaaaatattcttgctaaaaaatgccaataatcatctgagccttcagtgagtcataatctttttgctggtggagggtgatatggtttggctgcgtcccctcccaaatctaaacttgaattgtatctcccagaattcctacgtgttgtgggagggacccaaggggaaatgattgaatcatgggggccagtctttcccgtgctattctcgtgatagtgaataagtctcaatgaaggcagaaataaagatgttctttgaaaccaatgagagcaaagacacaacataccagaatctctgggacacatttaaagcagtgtgtagagggaaatttatagcactacatgcccacaagagaaagcaggaaagatctaaaattgacaccctaacatcgcaattaaaagaactagagaagcaagagcaaacacatccaaaagctagcagaaggcaagaaataactaagatcagagcagaactgaaggagatagagacacaaaaaacccttcaaaaaatcaatgaatccaggagctggttttttttgaaaagatcaacaaaattgatagaccactagcaagactaataaagaagaaaagagagaagaatcaaatagatgcaataaaaaatgataaaggggatatcaccactgatcccacagaaatacaaactaccatcagagaatactataaacacctctatgcaaataaactagaaaatctagaagaaatggataaattcctggacacatacaccctcccaagactaaaccaggaagaagttgaatccctgaatagaccaataacaggctctgaaattgaggcaataattaatagcctaccaaccaaaaaaagtccaggaccagacagattcagagccaaattctaccagaggtacaaggaggagctggtaccattccttctgaaactattccaatcaatagaaaaaaagtgaataagtctcatgaggtctgatgggcttatcagcggtttctgcttttgcttccctctcattttcttctgttgccaccatgtaagaagtgcctttcacctcccaccatgattctgaggcctccccagccatgtggaactgtaagtccaactgaacctctttttcttcccagtcttgggtatgccttcatcagcagtgtgaatatggactaatacagagggtgttgggatgttgcctcaatgttgatggctgctgactgatcagggtggtgatcacttaagattggggtggctgtggcaatttcttaaaataagataacgattacgtttgccccgttgactctttatttcatgaaagattcatttgtaccatgtgatgctgtttgacagcattttacccatggttgaatttctttcaaaattggagttaatcctctcaaaccctgtcactgctttatcaactaattttatataataatctaaattccttgttgtcatttcaacaatgtttatggaatcttcactaggagtagatttcatctcaagaaactattttctttgatattcataagaaacaactcctcatccattagttttattatgaaattgcagcaattcaatcacatcttcaggttctacttctaattctagttctcttgctatttctaccacatctgcagcttcttcctccactgaagtcttgaattcctcaaagtcatccctgagcattaaaatcaacttccaaactcctattcatgcttgtagtttgacctcctcccatgaatcatgaatgttcttaaggcatctagagtcatgaatcctttccaaactattttcaatttactttgcccagatccatcagagcactatctatagcaggtatgccttacaaaatgtattccttaaataagaagactggaaagtcaaaattacaccttgatccatgggctgcagaatggatgttgtgttagcagacacaaaaacaacaatgaatctccttgtacatcttcatcagagcttttgggtgactaggtgtgttttcaatgagcagtaatattatgaaaggactctacttctgagcaatgggtctcacagtggactctaaactttcagaaagccacgctataaacagatatgattgtgatgccattcaggctttattcttccatttatagcacacaggtagagtagatttagcataattctttttcttttctttttttctttttttttttttttttgagatggagtctcactctgtctacccaggctggagtgcagtggcacaatctcagctcactgcaacctctgcctcccgggttcaagcagttctcctgcctcagtctcctgagtagctgggattacaggcgcccaccaccgcacctggctaatttttgtgtttttagtagagacagggtttcaccatgttggtcaggctggtctcgaactcctgacctcgtgatccacccacctcagtctcccaaagtgctggcattacaggcgtgagccaccgtgcccagcaatttagcataatttttaaggaacctaagattttcagcgtggccagtgagcatggacttcaacttagagtcaccaggtgagtcagcctgtctttcaaagatctgaagccgggcattgacttctcctctctagctaagaaagtcctagatggcatttacttttaatataagactgttttgtctatattgaaaatttgttgtttagcctagccatcttcatcaatgatcatagctggatcttctgggttacatgctttagcttctccatcagcacttgctgcttcactttatacttttctggtatggagacagcttctttccttaaacctcatgaaccaaattctgctagcttcaaacttttcttatgcagcttcctcacctctctcagccttcagagaaatgaagagaattaaggacttactctggattgggctttagcttaatggaatgttgtgactggtttgattttttatccgaaccactaaaactttctccctatcagcaaaaagtctcatttgctttcttaccattgatatgttcactagagtagtacttttaattttcttcaagaatttgtttattgtattaacaacttgactaagcgtttgttgcaataggcctagctattggcctctttaggcttttgacttgccttccccaccaagcttaatagcttttgatttaaagtgagagacatgtgactcttcctttcttgaacatttagaggccactttagggttattaacaatattggcctaatttcaatattgttgtatctaaggaaacaggaaggcccaaggagagggagagagatgggagaatagccagttggtggagaagtcagaacccacacattaattgtttaagttcactgtcttatagggacacagtttgtggcacctcaaaacaattacaatagtaacatttggatcactgatcacagatcaccataataggtacaataataaagagaaagtttgaaatattgcaataatcaccaaaacgtgatgcagagacatgaagcagcacatcctgttggaaaaatgacactgatagacttactcaaaacagggttgctgcaaactttcaacttgtaagaaatgtaatatctgagaagcaaaataaaacaaagtgtgcctgcattgattgtttttggcaatctcttactgtgcctaatttataaattaacctttatagatatatataaagaaaatcatagaatatataggatttagttctatccacgacttcaggcattcactggaagtcttagaacatatcctccatggataaatgggcactactgtaccagctttggttcaaatttttggaagagattttttttcctgtctctagccaataccaaagttgatatatgtacattttcttactgtcccgttctgcatagtgagctttttttctcatttactcttaccctcaaagggtaaatctataatgtctcagaattaggtagaagtctcctgttaaattcctaattttggatgcttttaactttatagtaggacctgaaataatggtgcttccttcaatcaataatgacttcaagccaataaaatatggtaatataatttatgatacataatagaggcctaataaatgtttgtttagagagaatggagaagggatgaaaggactaattgggcaatagagtttggatgtttctttaaataatagttccttgaccccatagatgtttgaggggaggagtgtggttaattgtactgttaacttttgtttagataagaaaaggaggagttggataagttatatatgagaccctggcaaggtgcaaagagagagaaaggcttaataatggaggtatcagtcagagttctggcaggaaagagatggcaaacctagatggatggaatagcacctgccatggcctgtttatgaactggactagagctctgtttgcatagggtaaggaccagaagctaaaaacaccattttgaaaatatctctatgagcttctgtgcatgagaagtgcagttctggggtcaaggcaacaatgatacatcccatgagacctcacagtttttgtagcacccaatcagataatagtcacctggtaaagtgctatgtgagtgtagggaaagagcacgttttaaatagaaccagtcttaggagaaacgttattccgctgaagaaactagaaagcacaggcaatgtttgcctcctgaaaaattactccatgttaagatttataggttctaggtctctcaaattagttgaatctacttggacttggggttgaaactcaatgtatagtaagttccattagtgataaaagagaatgaaaagaatatggaaagttaataggctttctagaaaatatagccatttgttattatggttcattattctgctatgtaaaaaaaaaatggttaaattgaggaagggacaaaaaaaggctctggggaaaagggtatacttttcatggtaagaaaataaagtcctgtgttttctggtgcaaggacaagttacttctccccaaggtatgaccctggcaatttctggtgaaagccacaattcctagaaacccagacccagatatcagcagttaggaaaatatgtatcttatggttaaaatgagaaagctatgttctaaggccatatgtagcaatgggacacagtcacaaggaagagagccagggtctgagcagcctcagcaaacttggtgcgtgagataagcaatggtcagaaagatggccaagtcagactcagaaaacccaggtggagtcatggcagaacaaaaggaaacaaaatccaaattcgcagacaaaactcagaaagacaccaatagcagtgagtaaagcaaggccaggcacccaaaactaaggaggatggtgagaagggtcagcccttccagagccaaagagcaggtcaaggtggtaaacaactgccgtgacaaataaggagaaaaggagctatactctctttatgttttacccacatcgggtaatgcctcatacagcatagatacccattaccgattgaatgaataaataggcccaacaagcagatttagaacattggaaacaggtcttcctagttcagccaactgaactggtttagctatcacctaaatcagtgcttcttaaactttaatatgcataaaaccacctggggattttgtttaaatgcagattttggttcaataagtctgggatgcaacttgggaatatgcattttaacacagttgtgaccgctatgctgctgatccacagatcacactgctccacaccaggatttgaataacaacagccttgacacagaagcttgaactagctttttgttaaggcataaatcaatttcaggagggaggactgcaagtagaaataaagaagcacctgccaggagtaaggaggtgaagtctagtcaagaatgacagttcttgagaggagtgatttgagaaactctcttgtgactgctgacagctcctagcccagcaagaggagacctgggtagctcagaattgcacatcaagatttttttatttttgaggagggaggggagatagaacatttaaaattgtttactcacaggagccatcacaagttttcataacctgaacaaaaatcatcacccaatgaaggatttcatttcagcacactccatctgtcttgttgcataaaaataaaagttcagggtttcttttttttcagtttaagtatgtcactacagtagagtttagtgacataaaaagatgatataaaaatagaattgatggtgtagcaaaaggtagaaatggggactttatagacatcgcagacagaattatcatattaactctttgtagtctccaattaaatacctggcccctcctctgtccttgtacttaccgtcctctatgaactatagcatttggtctccatttaaggaaaatttgcatcatgcttctgtctcttctagacacctattgatgcggctaccaagcaacagaacaacaacagcaacaacaaaaagtgatgaaacccaacttaagctatgataaacttctgtgttctagggcagtactttcagaatcacggacagcggcaaactcctgtggaggcagatctctttgatttcagtatgggccttgcagctatctccctcttgccactgtgcagaggacaaccatttttgacctgctgtaagtgtccaccctctcctgtcaattatttcccccttccctatattataggactgttccccactgtgcatatacatagaagccaacacagactttttcccataagcaggtgttgcatatatattcctagaattaggcacccatatattaaacaagttttccaggatgtatctgtagctcctagactgtttcacattgaatgcctgctctgcttcagtatgtctctctcagctactgactgtcaacctacatctgttcatgtttattaagtctaggagatggccttcaagacttttaaatgagcgacactttaggataggattcacaatatgtttcatagtataacaatcttaagatcatgtgtgagtaatcaacattctaatttattgataactgagcaaacttaagttgccattcttcctagtgtagtatagcaaatgaaaccatgtttacagcaggggattaactccatttcctaaaatcaaaattgggagtaaataagtgaggtaaaaggaggttcccaagagtgatgaaaccagacaagagaccacagccagtggtctatccttatatgaggccaatgcttacaaataataaaccgtctctgagttacagagactcaggagacatgggcttaagaagctgattgattacaattagggaaagacacattggaatgtgacagctaagaacatttcttttctttttttcttttctttttttttttttttttttttgagacagggtctggctttgttgcccaggctggagtgcagtggcacaatctcggctccctgcaactgcagtctccacctctggggctcaagccattctttcacctcaacctcctgagtagctggaactacaggcattcaccaccatgcccagctcatttttttttttgtattttttgtacagatggggttttgccacattgctcaggctggtctcaaactcctgagctcaagcaatctgcccaccttggcctcctaaagtgctgagattacaggtgtgagccaccgtgcctggcctacattccatttaatggcataatttttaggaaacattattgtaatttcctcagaataggatttatggactacaagtttcatggggaagattctccaaagctggccctaaaacctgcagtatctgagggataatggcctagaggatatctgacatggtagcattaagagaagtaagagagggctgggcatggtggctcatgcttgtaatcccagtgctctgggaggcttaggcaggaggattgcttgaggccaggagttcaagaccagcctaggcaatatagcaaggtcctgtctctacaaaaaaaagttttaattagccaggtgtggtggtgcacatctgtggtcctagctactccagaggctgaggcaggaggatcacttgagcccaggagtttgaggctgcagtgaaccatgactgtggcactgcactccagcctggatgacagtaagagaacctgtctaaaaaagaataaaaaaagagtaaatgaccataggaaaggcacagtgaagtggaacattgtcactggcagttataaggaacagaaactccatgggtctcagagtcaaaggaagacattagggcttattcacccagaaatgcgtgctaagtcaaggtcaaaacaatcaactttgaacttgggtcttagttttgcctccatgctggtttttgctaaggatccctcttggatacaagagccttcctactcatcatggaaataacagacaaaaaccacttgatgatggtgttatgagtttcctattgctactgtaacaaaattaccacaaaattggtggcttaaagcaatgaaaatgtattatcttatagttctggatattagaaacccaaaattagtctctctaggctaaaacagatgtcagcagagctgcattcctctggagactctaggaaagaatcatttgctgttacttttccagctgctagaggctacctgcgtttcttagcctgtgacccccttctagcaatcacagcaccctgacctctgcttccattattgcatctctttctttgattcttactcacctgccctctattataaggactcttgtaattatattgggcccacctggataatctgggcttctattcttgtctcaaaatacttaattacatttgttaagttctttttgctatttaaagtaacatatccacaggtcccagggataagggtatggacatacttgaggaaccattattctgcctaccatcagccgtgtcttcactgaaggacaaaaagcatttatctatgctgaacatggtgagtaactcaggacccaaagagctcaaggaaaatggctcactattccaaaagtaaaaggatttaccgtagcctagtttgtcaatttaaaacctttaaacacttaacatcacttcttgctccaagaaactctctccttaaatcattttcttgcaatacatcatcattattttttaaattaaccaaacaattacagcaatttttgtgttctgaaaacaggaacatgatagttggcttctctcccagaaaccttttacatttctttttacctatgagtgttatgaaaatcatctccaacatatgcaaccagagcagcacactagcatgctgctgtgtcctggctaaaactctcctgggatgctcacacccgagagagcctggcagaatggccactcactacttttgcccaattagaggaggattttgttgctaggcaggggtttacgcttacaaaacttcagacagaaatgctaatcagagactgaaggcttcacttctcctgcaatcagtcaagtcctgtcaattctacctccttaatctctttccatccctcccctttcctctctaaccttatgccttttctcaaggcagtgtgacacattgcagggattccccaaaatgacttgatcgtattaaccatttagggtgtatattaaacatgcagattcctaggcacctcacttaaaattcttattctaagtcttggcaagggctttggaatctaagtgtgtaataaatacgccaaagtgactcttattattaggctaggatgggcaaaactgacatgatgaaataggacgggcttagaaatcaggcacacctttgtttgaacaaacatttttcaagccaatgaacttggaaaagttacttagctactctgatcctgtaaaatgaagagttcattggttggagagttgaatggaatcgtgtgtgcatttcaccgcacacaaagcccagagttcaataattgtgaattatcttctcttaccgcccttcatgtctctccctatattataatacctgtcatattatagtttttacagctgagggatgctgactgactctgcaaatgtcacagaaagacaaccagaaacacttgtctaagtcctgtgccaggaccttccctatttgtccagttgtcagcttcatcgtgtaattacacaggctttcagagctctccctgctacacagcttcctctcattcacaagaaaatggtgggcttaatcatgtgagaccttgtacaccatcatggggatttaggctttttccagtcctttgtgattttcctttcctaaggtcttcaaactagatatccttatctgcctccctattttacctacaatcatatccccttccccaacaattgctcccttgcaagctctctgcttgaccaggtcattttcctcctactctatgggcaacaactttacaagtttgtccacaatgctttttacctgttcacctgccacactgttcttcaaagctcacatcatattgctttccataaaaccttccacaatatccctagactaacaccccaggaatacaggttgtccttaaaccttgggttacacacaagcctttaaatatgaaccactctatggtgttcagtcagccggtagtcatgggccaatgctgtctctctccttgggaatggggacctctgcttctcccacctcaacagtgtatgctgtatgaacacacatggctttgattgatatgccaggcattgtgaaatgccttctctaacaaatacttcaggcttgaacacctaatcttgagtggtaatggaacaggtttctgggagatcagaacaaatgcagagaaaacacattctaccttaaactgtactttctttccataaatatcctagaaatgctgcaagaaagccccgatactgtggaacatacaggtagaaaactgaaggactaatacaatttccagtagcccaaaggatagtaagcaagaaaatgagttgtgtccacagttaataataataatgtgttgtatacttcaaaattgctaaaagaatagatttgtaatattctccccacaaaaaagtcataagttggtgaggtgatgaatatgttgcttagcttgattgagtctttctacaatgtatacatagatcaaactatcacaatatacctcctaaatgtacacaattattatttgtcaattaaaaatacatttaaaatgagttaagcatccctttctatgcttttacagctgcctctgccttcccaaactaccccagtattcactcccccacaccttgggtagtcagccaaagtctcccactaggaatttcttgagacattccctgtatctccagtagttatcttatacccagttccaaagtgatgtctcccataccctgagctcacctccccatacacactaaattgtaagtttctggaaaacaggtaccacatcttgttatctgtgtgtcttcagcatttagcacagtatctgtcacacatctgctctggaaatggagtatgtatgaatgaagaaattaatgaatgaatgaatgacttgactgatggtgagttaatattggtgtcaaacagaaccctctgaagaaaatggtcacagtgaccaagcaaagactcagaattaaagtctttcactccatggagaaaatggtttgttggaaataaagaaagttcccaccttccaaatggaacccgtatataacccagtggaaattatgacttaatttgaggagaattcctataatagcaacatgttgtgcagaaaactgaagatacaaaaaagactttgtccttaaggatgggcctctgctatagcacagggagtgtggcatgggaagaaagtgagggttatgataaagatcagcatttctattgaaaattttagtctacacattgttttcaaataaattatttattgaaaaggcgtctgtattagaaatcagagtatctgagtttccaaaaaagaggcctcacctccgatctttagcttcttcacctgtaaaatgaaaagatctctacccatctgcctgggttgttggggggatcaaataagaaagggatgtgacagcattagagctattagaaacagccccacaaaataagtgactgaataagtcagtaagatgaattttttactgcatctgagctaagagcaggtagagcaaggctttaaaagcaatactaccatgaataaattgtgtggtgttggttaagtaatctccccttccacaaccttagttttctgatccttaaaattagagggtaagagtggaatgatctccaaattaccacttaacctaagatatgattcctaagaccaaatagagaaaaggcaaggtaagttcccgtttaatgaatcaaagaataccagcttccttggggcattcatcagaacagagctcaggtcctataaatctacatcatacaagtgacaatcagaagcacattgtcctctagcctatgttacagctgtgcttgttagcagcatgtccctagccctcattatccccgatggacctgaaccatttggccaaagccttacagggattgccagagctcatagttatttataggtgcagttcatcaaaggctttgagctttcctttgtggtgagagctgatctctttgactctcactctatacctttttcttttatgttctgtctgttctttaattccttgcatttttatgtgccttcagttctgattaattcgaagctgtacagattttaccatactgattcattggttgggagggatcaacaagaggaggagagaaatactataccaattcagcacacagaaaaccttagctcagagacctgaaatgaaggtttgagggtaatgggaccaagaagcatcacctgtgtgccaaatctgtcactaggaacttttcataggagtttatgttgcttaggctatttttatccagaggaatttgggttacctctagtttgggaagattttgcaagaattcacctgaaaaaattggaaagacaggaaatctggccacactcccaggatttctggaagagctgaacagccagggctcacagtccttattaaatagctcaagactcagaaaaatctttcagaactcagagcagccctaacaactgggtcatctggttaacctcctaggcagcagaggttcgcatttattctcatgctataccattatggcaactcagctatcacattgttttcactattctcttgctcctactcccacagctaactgctttattctttttctctgtctcaagttctgattgtttcagttagtctccattgtttatgatgagtaaaacttctacatcaagtcacctcataggctctggtcaatgtacagcttggttgtccttaaacaaggtacccatttctcgtctttcatctgtggccaggggagcatgggcatgagataccattatagcaagttatatggagagaaaccctcagaagggggctgtggcgggggtggagtagcaaatgttcttttgtgtgtgtgtgtgtgtgtgtgcgtgtgtgtgtgtgtgtgtgtgtgtgtgtgtgtgtgtgagagagagagatggggttttgctcttgttgcccaggctggagtgcagtggcgccatctcagctcaccgcaacctccacctccaaggttcaagcaattctgctgcctctcagcctcctgagtagctgggattatgggcatgcagatgttctaaagcctagactgcccagtaaagtgttcaaagtcagtgtcataatagagcctgagatgcctatataaaccaaacttctcttcctataaaaaacttatgatctataaaaataaattccaactcaaaaagcacataaacaaaggttttaagaacacttttatgtaccatgttattattttacaattcattctataccactctattattcattgactaagggttcttcaattagtgaggttcctaatgtgttaaaatacaatttactttatcaaagtgtagtggtggcataacttctaagcatcatctgttagaatgaagtacacacgttcaaggttgcattttatttaactaatggtattgctatggtattattttctgtgataatctattgcagaactgagtgctttagatacattccatgagaccagggcttttctatgagctggagacctaaactgtatttacaacagtgttaaaggctctgctcatcacagcaatcttacggtatttgattctctccatgtcttggtaaacagtgcaaatatgagggaaaggaaactgtatatttatctaagacagtggttctcaaaccatggtcctaggaatagcatatcgtcatctgagattgttcaaaatgcagatcctcaggccttaccccaaacttactgaatcacaaactttgtgggtgggtccagaaatctgtgttttaacaagccccccaggtgatttatgtgcatactaaagtttaagaatagtgatctaggatacttgtgtgagcttcctaagaccccagggagactctattttccctgagaacaatgcagtatacccataacttggctaagaacaagagtattaaaaacaagatattaagacatcttgaacaaggtattaagacattaagaacaagtattaagaacaaggtaactattgtatctctagttagttctgagtgagggtcaaatctgggaggaagccctacctaaggatgaatgccatatacattggttctttttcaccattctctgtccttcccttctgcttcagcaggctgcccctgaccccacctcatgtctaatctccttcagtttcctacatagaattttctcctacttcttctgtcaaccccaagtccaaatttcctttcagacctacttcaaaaacgactccctacaggaaatggtctatattgtctctcaattacatccattaagcatttattaaacacctactttttttcctggcacaagttaaagagacacatgagtatcagacactgttctcatgtccaataaggatgcacaacaaatcacccctctcctttgctttcactcaaacctttctctgcagttcctagtaagttatcacataatttcactttggttttcaccttcttccagcatatatttatcttctctgctgtttgacaggtttcttgagggcagtgaccatgattttaaactcatttgtacatagtatgtttcctaacagcctactgagcacatgctggggacatgttgggtttaatgaatgagatcacaaaacaatagtatagacatgtgcagaatggattctataccttcacagtaagtctcactgtcttttatttctctgccttttgatccaccccttacccactgacttgggctacaaaccaataaaatcctcaagacaactcatttgcctaaaggtggattcatgtttctctatgcggggctggtgaggaatccaaacaagtgccaggccagccactgggccaaatgacaatccaccaaactcttaattaagtttaaaaatacatcttaaatactgttctttggtacccctttttttggttggaatgatgtttgggcttaaaaaaatatcttgtagaatcctgactcagggccaaaggatgaattggatgccatcaattaatggagttagacagaacctgccaaataaatgacctgtacatgaccagaaagacacaaaggggagtgatggtctgtttagcagtgatgaggtgtccaaatttttcagctgaactaggttacaggccaagctgtattctccaagaccagctgcctaaaggttgcttacaaattcccttttgactcacatgccaaagcaatacttaggtttacagagcacatacctgcctgccaaggtagttatttgcaaatatgaacaacgttttgcaaggctcatatttgccaattttcccctctttatagatcaaagctgcagagagcatcataaaaactaaacttctaggtaaagacagaaagaaaagaaggcaagattcctgtggctctcttggaaactcatgctgagaaaatcatcaccattttatccataggatgttggggtcttgagtcatcagaagactttggtacctgctacctgatcttggggctttagtgaagccacaagaaactagaaggacttgccatgaaaaatgtatggttttgtgaaaaacagagatgagatggtaatctcacttaggctcactaaggttgtcagtaggaggaagaacctctggtaagaaaaagaagctcaactatagaacctggaattgctaaaactattcactaattagcagcctcagatgtactctgttttcaaggtaactcaacttcccacttaactctgacccaaccatggactcctctgggtactctgtggccaagctgtgacaagaccagatcattcaaaccaaatgtctctgaaagacagaagataacacagagaaaataaatctaggagttgtatgaaactagaatgatcttgtttacaagatacgacttcctcttcagggcttgcagttctgcagcattgactaaggtaatgacattcaggtagttcttttcctcctagcacacatgctaccatcagtgtgttctagacatacatgcctcctgactcagcagactggagaccaacaataggaaataggttttaattttatttttcagctgtgatcaatagacaacaactaactgctatgctggattgaggaggagtctaacgtaggttttatctcagctcagtgaggaaattatatgatggattagtgatgtcttgcatggatgaagataagaggataaagagggagtaatcgggggatgaatgataatgcctgtgcccggtatttgccatcctagtctagatctaagagagagatgccaagagagaggtacaggattctctctttcaccactctatggatctgactcctcttccatgacaaatatgtgaattaaggcctcctcacttcagggaaaaccttacctaaccacagaggcccaattgccatgtgcaaccatgttagattattgcatagtagcttcaatattcacacaaaagaaacactagtattttttttttgacacacagtcccactctgttgccaaggctgaagtgcagtggctcaatctcagctcactgcaacctccacctcctggattcaagtgattctcctgcctcagcctcctgagtagctgggattacaggtgcccgccaccacgcctggctaattttcatatttctagtagacatggggtttcaccatgttggccaggctggtcttgaactcctgacctcaagtgatctgcctgccttggcctcccaaagtgctgagattataggcatgagccactgcacccagcccatttttattcctggaatgaattatgacagttatcttagtcttccttttggtcacacaaaacctggagtttctaaagttacaaatagctatcacaggcaaagaagctgacccttctgggttactgtaagctttgcaaaacagtccatacttggagagaaaacctgacttgggctcatttaccgtgacttgggcttatttgtcgtgacttgggctcacttatccttgctcatggtgaagtttataggcatttctcatttctggcaagctgagagaggaggaagagttacaaaatgacttcagtaaggggaaactattgcaggagagtgcaaattgctagttttaaatacaaatgtcagaagaaagtctaagtgaaagcaggggctggtatgcaaaggaaaacaattatgaatggggaagacctaaaaaaaaaaaagacattctagatcaagaggaaaggagaggtcctccatatgcccacacaaaggacatcggttaaggatcatgctagacagcaagattggactgaatctcaaggtgtagcaaccagcttatttaaataagtaagtccaacacttatagggactttagatctaaacagccaagagcaacaatcaagacagggaagtgctgaaacatcacaagtcaacctccatattccacatgtggcccaatgacaagcatttatacaatatgattgattaccctgtagtttactttgtcaatcagtcatgaagttaattacatattactcttgggcactattataaataagggtatagcaaatagtgataaatttaatggtccttagcattcagctattaaattgatgacacagtcatatcagcattgatgaacatggactttcttcatcaaggataatttatatcaataagtataatgggctatctcattctcctttggccaacacattattcacactgttataggcagtgaatctattagtaaatgaggaaaaaatacgttttgttttctgttttttaaaaaaagactcctgataaatgctgattataagaaaacaggaattttatatcacggacataaaggttaaagaaaatgtgagctcaccataaaacttgctgaaatggaaaattaaggtggattctaaagagataacctgcatccaactgtggcttctccaggaggagcctttgaattgtcctgttcacctacctagaatgctcttgtcttccatccactccccgtacacttggatgattccattcctccatcagtcattgttttagatggcatgtcttccaagaagtcttccctgaccttctggactgagtaagatgccaatcttaggtcaggtcctccagaagcaaccctgaaataaggattcatgtgaaagtgtttccagaaataacggataggagagtggaaaattaggaccagagaggagaaggagacaagcaaaagtaggatataaagcaaaatctcaggagaattttggcccaatcctgccagggatatctaaaaacagtgtagtcacatctcagttgtctcaatgaacaacatttaaaccttgctgtgtgtcagtcactggtaaggatttctccaagcacttccagtactgcacactcaaggagaacaatctagcagtctcaggacagccctccaacaaagaggctgaggtgctgagtgttgagagagaaaagacatcaggaactctggtgtgcctcaaaatgataaaggaattcaatgtgacagagtagaacatattgatagtatctgcttcactggccctgcaaagggttcctgtagcaccctgaagactctctaagatagcatttacaatgctgcattgtagttgcttagttacttatctgtgtttcttgctagattataggctttgtgatggaaaaagcaatggctgccttgttcatcattttatctacagtgactagcacagtacctggcccatggttagtattcaaaaaatatttgtgaaaggagggaaaaaggaaaggagagggggaagtttgtttggtggaagtattatactagtgtaatacattacacactcaaacaaaaacgaatcttggtaaaacattattcttaaaggaattatgcaaacctactttactcattctgagcatgaaaatcttggctgtaaaagttggatatcgtccatgcagcccaagagttcatttgtaacagtccagtaggggctcttatatcaactagatgaggggagaataataaaactcctggtctggaatgaaagctatagccattttactatatggtcaacctgaacaaacacaaatatggcaacaataatgtttatattaattcctagcttgtttttatgaaatattcttgaaaattcttagctaatgtgggctagagaaccagctccattccaatcacatctagattgtattttaatctttcattattcccttacatgtatcatttaacatgtattttttaaaaactaaattctcagtggcttagtaaaatgaagatgtgtttcttagtcaaaaaaatctaatcaagtttttcttgggcagtcttcatacaatgattcaggcatcctggttttaaacacctgtgtctttatcatcccaccttcttctaaagcctaaagtctcacacctccagctggtggataggaaaagagaatggagagagcacacctcattcctaactactttagtccagaggtgaaacacatcacattcccttgacggtgtctagtcaaatggctaggaaatgtacccacccatcaataaccctacactggaaagcacaaatatttggtggatagctaaccaaccatgtcgttcattcaacaattacttgtaaagcacctaaaatatacaaagttccttgttagctgttgggaataaaattgtaagttaaatagaagtggttgcagccccatggagctagcttacggttttgggggtaaatatacattaatcaagtaatcatgaaaacatatgatcccaactgtgcaatgaaggaaaagtacaaggatagaataaagtttataacaagctagatctagcctgaatacctgaggaaggaacatatgggctgatatctgaaattggaggaggagtatctagaaaaagttggagagaaaagcattccaggcagaaggaagagcatgtgccaaggccctgacataagtaggaaagaatgcctgtgtggttgaagcctgacagtgagaaggaaaatgggggtgtcagggaggtgggggagtgttgtggaatgaggctagagaagtaggcagagaccatcaggggtctacaagctatggtagggattttagacttcttcctagttctgttgattcttattatgtgtttactatacccttctagtcacacattggtttatgaaggttgtttatatacatatattcatacagaccttcactgttcttgcccttcctctcagttctccactattatcaacctcctagagtatcctttccttaaggccagttgatttcaatgaaagttgtcttcctccccttggctccatttcagcaggcataaccaacactgtgcagtgccccaggcacactgtgggttctcatatctcagtgcatttagcacacacttgctgctccttgtacctagaagacccacatcctgtcatacttcaggcttcattgcattcatccttcacaactcagcttccccactcaattctactgtaagtccttcactggctttcctcaaactcctggctcagtcagattgctatccactccaaacccaccgtactccacattaaatgcaccactagcatagcacttattaaattgtgtagttggtttatttgaactgacttcccctactgtgttccaagtttttaaggaaagggatagttttcattttcatttccatattaccggtgtcttgccattattttatacatagtaggcactcaaaatatagcattaattgaatgaaaaaaatatttctcaaacttctttcacaagacactaatgtcactatgagttttacctaaattcagatacataaacaagttattttcttggccaaataagttggggaagattgtatattatgccctaatcttaacaattattgacaatgtagtagatgtatagaatacaaaatttaaggaagcagctgctgtcagcttaatgcaagcggcaaccctgcacttgtaataccctaagaatgactgcttccttaaattttgtgcccttggtggctggtttacctcctcctagtaataggcattgcacattgtcatttcaaaggctctcagagtttctgcaatagcaaaaacggtttaacttctatcatctcagggtaatccaaatgtatttgaggatctggccctttttaatttttcattaatacctattaacctcccatagtactgatgctctttgaaatgaacttttaaaatgctttgccactatatggattaatacatttcgatgtgtgctttttcaaaaatgataacctttatgtgggagatggatttagatagaaacttgggtccatttatcaaaaactacctttgaaaatacgttgaatgttatgatagccagaagaaatttctaattaggttctaataatgttgctggcctctcaaagtagttatagatgagaccactttaaaaggagggccatttccatcagtgaatggatgggtttacacttccaggtaaagaagatctgttttatctctccaaagacaaataaatctattggtctgtccaatgatgggatgaaatgagaagaaaagttcaattacttgggaaataagcctggtgggataggtcagtggccctgcttaacactgccaaaatctcagctctctgcttgtccatcttgcaaatgtgtgtctgactccatctcggtggaaggaataggatgtcttcctggctgactcaaagaaccaagtcattttatctcccaggaaagtgatccacccaaaagtctgtctgtcataattattgtttagaggaggagaattgcttctctttgacaaacagagtttcagtggtagcaatgttaggctaacagcttagtacaaatttttggttttcttgtttcatcgaggaacttccaagctgtttttctcacactagataactaagcatcataactcagtgagggaaagattggccagaaatggctgaatctatgcagaaaggctaagtgatgtagaaaataagcttctgggaactgaaataaatcacgtcacaaataactaaacaaaatttcaggaaaaaagagaaatattgtattatcttaaacttggtttccagacatttagagggtggctggagtaagtctacataaggtcccagccagcagccaattctgcagtgaggagaacccaggatccagacccaggtcagatatgatggttgcccagtggagccaagactgagagaatcccaaggattggcaaggccctaaaatgtcctgatgattttgtgcccaaggataaactagacattcagcccaagtaatccaaagaaatgtcgtggacactagaccagagcagggaccatgacgaatagtagtgataaaacggagggtccagaaccacgtgtgtgaatctggctagatgtctgagtgtcttttcattatctgagggtggtcagtccaatctactataaacacccagaattggcttggacatagcagtagcaaaactattttgtgtggatcattcatgtatgattggttaggagtagctaatttctccatgcttttgggatctgtattgttctcttattctaaaacaaaatttcaagtcctgaacacctatggtggttgcattaggcaataattaagagaagcaagtaaatgagttagaaatacatagtaatcaagtttcctggctgtgccaagacttcctcctgtctgtcagtaaatcccacattgcccatttgtggtttgcagactgattaagctatacaaatggaatcatctgttcttttctggtcttcaagcgccttttcctcctcagggatccaacggaaggttgcctccaggcatcaaatcacagcaatcaataaaccaccatgagtagcatggctcatttagaaacagagacacaggcattttgctagaagaaacaatgattacctgtcatgggttcagagacttatggtacttattagaagtcaaagaatgtgagacttttcatggccaaatattaaactattccttggccctcaaacctgttcttactgtgattcacatgtaggtgaatggtatgttcaatgacgttaaccaaaagtttggggagtaatctttaatttcttcttcctccttttcttctccctcaactccaacatctacatagatattgagacttatagttttttcttccttaatatctttataatctttccagtgtcacagatttacttcaaactctcattggacttctatttcccttcccacttcattcattcgctacttaacagcctgagtggtatttctaaattgctactctgatcatgtcatttctctgtttaaaatatttcacactgaattgcctgcagaacaaatatgagtccataatgaatgactctgaccaaataattctatggaatgctctagggcttagtaaatgctggggtggattgactttataaaaatagtgaaatacatagattataagatgggaacaatacacactggagactactagagagagagaaggaagagggtaagggctgaaaaactactcattaggtacaatgctcactacctggaccacagaatcattcataccccatgtaacaaagctgcacctaaaataaaagttaaaattattaaataaataaataaataaaatagcattctgtctcagctttcatataatcagtgcacagaaagttacataaaacatagcagacactcaaaaactattcattcaaagaagaataaatgagccatgcaagagaataagatttaaattctaacttcatccctttctagcttaataatctcaataaagttacctagcattcctgggcttcagtgtccttcaaaatgtggttaccaacactggtaggattaaatgagatgtacttagaggacttagccaatgacttagtggcacacagaaataatttaaacgcagtctgtattagcagcaaataggttaacatgacaaaaggtatgtacttcttaggcgtcacctatacagggtactttacaagaaaattggggagttgtgacctctgactgccaagacttggaacccacattgcacatatcacccctgtattagtcaggattctctagagggacagaactaatagactagatatatatatataaaggggagtttattaagtattaactcacccaatcacaaggtcccacaacagccatctgcaggctgaggagcaaggagagccagtccgagttccaaaactgaagaacatggagtccgatgttcgagggcaggaaggattcaacatgggagaaagatgtaggctggaatgctaggccagtctctcttttcatgttttcctgtctgctttatatttgctggcagctgattagatggtgcccacccagactaagggtgggtctgcctttcccagcccactgactcaaatgttaatctcctttagcaacactctcacagatacacccaggattaatactttgtatccttcagcccaatcaagttgacactcagtattaaccatcacaacccctaatcagtcaatcaaaaggcatttactcaggtctcatcatgcaactggaattcatgtttttcaataaggttaggaaatcttccctccatatcaaatgaggattttgcaattttaaaagtttagtttgatgttccagtggaaagatcaacatctgttggagttagagctatattaagtagaaattaatgattttagagtttgccttctaaaatccctctctgttagaattgtctttagtgagccattatcatctagaatggatccagtgacatagaacagaaatctggaagtgtggggctctattaataagaagtatgatgcaattactcttccaaagttgatcaagtgtgatcccactgatagatggaatgacaccagtaaagaaaaggtaaatccttagatttctaaatcattttaagaataggacaagaatttaaggaatattaagtccagttctttctccaggtaagacagcctttagcccctggaaaatgaagaatcctatcttaaaaaggtaatggccattctctgaccaatgcttcttcaactgaggactatgcagaacaattgtttttgtaaatcttgattggatttgaaaggaaaatcttttcagaatgctgagactctttcttcaaaatgcctgtctcctcatggtgtctctccaatgtgagatgtggacagatttctgttttgtttcacagcacatatggcagatactgtgtctcagcctcttgagctctggaactagcacagcctttctgtcttataaccctggggttgtaaggttatgaagttacaaattatgtacctaacctaaattctaaataaaatatggatttctatatcacttcctactgatactctaaaacatttgaagagatttattacttacttagcatttgtgaaaagtgctccaagattcttgcataaaaaatccatcacattttgcttttgttcactcactcattcatccaagcaacacttattgagtccctattaggtgcccactttaatttttcattttttccaagtataattaatgtctatttttaccactagactgtaagatttatatagagattagtccatctatcttcccatctttattgctgtttaaattgcacttatgtatcttttttgctgttcttctatatactgcacatatatcatttcccaacacagtgtgggtactcaataaagacttgataatgagtgaaaataaaccatcaaataagattgcttcctgctatgaaacagatccaactcatccaaagtaggtctagaaaatacagacaggtggagatataagtcatagagacagagagtcctaaacccaaaaaaattgtaaaggagagatacttataatttcagaactttttatagcagtgcttcatcagatgttaaaagtagtatgcatcatacctcaacagccaactggtctattctgccttattgagtatctatgcattaactaggaattgtgttcatatttgcaattcacataataaagtttcctgaatccaaccacccatcagtccccaaataaaataactggttctcacatagatattacacctgtaaatttggtagaagagagtggtacaggttgaaccagtgcagaatgactttgataatgaagacagagttctcattgaaagcctggggcataaatcactgtcaaagcctgtctctttactctgtccacacaaccatgggagtttcagtcctcctaaggagtagtgaggtgtgaagttaaaaggtttggacaagcatttgggagcctctgaggcttatctgagctaaccaagcctcccaaagccataaatctccaatgaaagcttccaagagtgacatatttcttgtggaatgtcccctagcttggctgcaatccagaagagcagggatgtgtgaactgacaagataaagccaacatacccattgcccttccatctcctcctgggcatttcttagtctggcttttgtgagtgtagtaacattttaggactgtatttgcctacttacagcaatactgcattgaattatcttaaggaaacaggatggcccttgattgttgttttctctctatggatgggttttctgttgttgttgttgctgttgaattgaagaacacagtgggagccaggacataattgctaccatagtcacaaaccacagactcctgggtattctgtgtagtgtttctgaatatgtccagagaccacatgcatccaaattagcaagttgcttgcttcaaaggcagattcttgtaacccactccagacaagttaatcagaatctctggaggtaagtcctggaaatctgaaatttaacaactcttcttaggtgtactaaattcttagacataaaaactttttattgtggttcctccaatgcaaattagtgttttaacagatgaggactgagacccagaggaatagaatgatctgcccaacgtctcacagctggtacactgggacccaaatctgtgccttcccaggtctgtccttgattctctacaacatcccccgcatctcctagggcattcaccaaagcatagcacgagtcctatagagaagtgctttgagatacttgcaccatctctggggcatgtaatctgagggaagaagagagccttaactggacagattacattccaattctgtgcaggctatcatgtaaacaagagagtagagaaagtatctctacaccatccggttgtcccttcaggctcccagcaaattttcctgctctacctgtccttaccttatgcttagaagagggtctggtattagtaatttgttcttctgtataaataagataaagaaatgttatacttgcatatgttgtttaccaggtactaccaggtttttatttgctcttggaagccttccctgactatctgcagtgaacactcccagacaacccttggtgcaacctccatttttgccacctccactgcatcactattatttatttgcacgtccatcacctgcactatatcatcagcatcttgagggatgaaactgtcttgcatttttatattctctttgccagctcaattcctagtctattgtagttgataaaaaaatgtgtgtgtgtatatgtgtgcttgtgcatataataaatccttgcaatgacctggcaaatagaacaaaaagtaattcccaccatagagatgaatgaactgggtagccaaaggcaaagtgatatgaggatgattacctagttgtccagtgaaacagaggagatttgaattgaattctgaatgaccccgagaatgctgctgtttccaccataccagagcactaccaagttccctttcaccatcaaagtgttctctctcctgaaggtagtgacttctttaaccaattctctgattttggaaaaggaagttttgccccattaatgaaaatgtagtgcattaattaaaatgcagaatgtaaactgagaactgatttagaagaaaaagaaaaagtagcaaagtccacagccagagagtctagaatcagatagagagcaagatataaggagcacatagaggtaaatggtgcgacaaagtctgtaaaagaagtttatgctttgagatgccccttctactaaataatatggtctgagtttcaggattagaggaagccttattagtctggacacatgctgctaataaggaaggtggtataaccccaagacagcacagagcactccacacagatgttatgccctagatgctccacgtttcctctcgaggcggggtcagagtgggagaataggctaggcagggaaaatgagtggcggatgactgtgcacaaactcatttatgaggcctgtagctggtggtatgcccaatatttataatagatcttaaaacaaagactggtggaaagacctgcattttacttggtcttgctccatcaagcaaagcagacttctgattcccctccccttttaaagttaacccttcaatcatttccttgcaagtttcaaacaggtctttggacacattcatctacaggtcacttggctacttcatggcatggatcatgccatacccttctcctatgtatcatctcctgtttgtactacccttgaggctaataatagctaagggcccttcttcactgtcattgtattagaagctcacatgaagcattaacccataaaccagggagagtcatgttacatggatcccaaaaattccagcaccatttcctctctttgctgttgccttggtgcatggataccttagtgtgtgaatatcaatgccatctatggctgctggacatcccagatgctggtacttctaccatcctttcaccctcagcccccaagaaacaacccaactgcatagagatatagatcaaccctcaggatgcccaaaactggattcctggggctcttgtttcatcaaaatcacttcctctgttctcttgacccatgtcattatattccttgctgtttggggaaaagacactctttaaagctggctttgtatttatagccacctccctagaactgagacatgagtctgtggagacagagcctggggacaaacctgagtaattgtcaccagactttacttagctgtgcctcacccctccagcatccagttcttttttcctggacccatcttgccagcatactttcacctcaccttaggttgagtccatcagaagatactcaggcccttgtacagacagatttccactagtcctgcccaccagtctagacaagggatgaacatgactgaggccccagcccagatcaccacttctggaattacatctatgtaattttgatttaagaaattctctccttcatttaggtcctatttatggccatcttatagggtctaccctctggtaggaagagttctatttcattctatttggcattctgcactgccaaattcagaagtccaaatcagagtgttcatgttgtaaatgaaaggttttcttttaactcccatcctagcagctaggttgatgtcagagggttgttgtcaagtctacagtgagaaaaagacaataaaattaagggacaataatcaagggaacttgacccctcttcccatgtacacaactggccaaaatctacccatattcaagtcacaacctccaaacaagctgagatatatatttggtattattttcatagatgtttacagtcctgtacaaagcattaaactaattttgtgtcaaatgttgtcactgaatttttaaagaaatacatcattccaaatactaaattatggatcaaattctcataaatccctaataattggtggacctaattatgattatatgtatttgcctaagagctccataaaatgataaagtattgcttgacttcctaaaagctacagttagaagactggtctagactgagtggtatgagaacacagtttgctttttacctttctgacccaattggcctttaattttgatggtctgcatttaaaattcattttgtgagtaaacccagcgaggctcctcctccatggaccactttgggtaatttttttttggcgggggggtggggggacaattttaaagagtgtctattatcaaagagaaattttaaaacatgtatatttataccatgtggttggacatcgtagaattagctggtaaaaaacaaaagaaggaaaaaggaaaaagtgccattggaaaggtacatagcagaagtaaactatgaagctatgtggtatagtgaaaagggcccaggatgtgaagaaataaagccagattcacggcctaattcaattcttgctagctctgtgttttggaataaatcaccttcagttgctttattgtatttcgggatcatcatctataaaaaatggaacctcccatctcatggacctctggtgaggatcaccacgagacaataaacaagtgacttttaattgtcaaagggatataatgatacctaacaaaagaaaacaaagggagtattgttcatcaggtattgatagttaacaattttattgctttaatataattatcccaggctttggaacaaagattgaaaaagagataaagatgcaataccacataactggagaattttagacaggatctcagagagcattcattccaattctcatttccagacacatattttatagagtaggaaactgaagtatggaggagttgagaagcttgcccaaggtctcacagcattatcctgagagcttgaaatagaactcaggtctcctgctgtccagctcccagcaacctctacaatccctaaagctgtttctagaatcccatctcttcgatcctgtgcctacaacccatgtcaacaaccattaaagcatattattcagttcaattgcctcctttaataattaaccagtttattacaataccttcccttccccttgcagtgcagagacagggccaaacactcagagaattgtcatagactcaactcagggagaaaggcctcttttgtttgctcatcaaacatttatctgagttcttacttgtgccccaaaactgtgctaccttgataaaaatctcagtgatcagaagtccttcaagtggtggatatactcacaagccagtgattaccatgtaattagcaatatgttaaagcaaatataaatggattacatagaagcttagaacatggtatgactaaggagccaggagaaatttgacagagatttctactttacctggaaaaatgataagttgtgacataaaaaaataaaaattttaaagccaagagaaaaagaacatatttcctttaactgtgagaattgtgcactgatcagcagcagttacgttatgtgatgatcacagtttggacagctggtttctgcccaccaggaactgaatcagattcagatcatttgaactctgatgtcaaagtcagtcatattttcaacaccctggatattctttttttaattattattatactttaagttccgggttacatgtgcagaacgtgcagttttgttacataggtatacacatgctatggtggtttgctgcacccatcaacccatcatctacattaggtatttctcctaatgttatccctctcctagcatccccccaccccacaacaggccctgatgtgtgatgttcccctccctgtgtccatgtgtcttcattgttcaactcctacttatgagtgagaacctgcagtgtttggttttctgatcttggatattctataacagcagtagttggttaacccctctgttcttagtttcttcatctgttcagtagggatgataataataatgtctcactgagaggattactgtgaagattaaatgagtcagagcatgacaaatgcttacaacaacacctgggacaaagtgagtgttcaataaatgttggcattttagtatgagaggaccaattgagtgtcactgaaaactcgtttcagaatgttactacatgaaaaccagggaagaggtgaagaaagttatatcagtcagagttcctcccaagaaacagaacaatgaggatgtgcatatattaagacatttattgcaaggaattggctattgttgggggctggctaggcaagtccaaaatctgtatatcaggccatcaggaagggcagactggaaattttagggcaggagctaaagatcctgtccacaggcagaatttatccttcagaaaagcctcagtgctgcttttaaggcttttcaattaattgtatcaggcccatccagattattgaaaaaaatttgctttacttaaatttttttttttttttttttttttttttttttttgagacggagtctcgctctgtcgcccaggctggagttcagtggcgggatctcggctcactgcaagctccgcctcccgggttcacgccattctcctgcctcagcctcccaagtagctgggactacaggcgcccgccactacgcccggctaattttttgtatttttagtagagacggggtttcaccgttttagccgggatggtctcgatctcctgacctcgtgatccgcccgcctcggcctcccaaagtgctgggattacaggcgtgagccaccgcgcccggccgctttacttaatttttaacagcttttttgaaatataattggtgtgtaaagaattgcacatacttgatgtgcacaatttgatgacttttgacatacgcagacacctgtgataccatcacaagctgattgacatatccaacacctccaaaagtttccttgcatcaatttacttatttatttgtttgtttgtttgtttgttagaacacttaaaatgagatctactcacttaacaaattgtgaagtgcacaatactatactgttcactgtaagcactatgttgtatattacctctctagaacttattcatctaacatgactaaaactttatacttattaaacaactccccagttcgccaccttccagcccttggcaacctctattgtattctctgcttctatcagtttgactattgtacatgcttcatttaagtggaatcatgcagtatttgtccttctatgactggtttagttcacttaacataatgttctccacgctcacccctgatatggtttggatattcatcccttccaaatctcatgttgaaacgtgattcccaatgttggagatggggcttggtgggaggtgtttgggtcataggggtggagtcttcctgaatagcttggtgcccttcttgctgtaatgagtgagttattgctttgagttcacacaagagctggttgttaaagagtctggctcctcctccctcactctctcatgctcctactctcaccgtgttacatgctggctccccttcaccttgcaccatgattgcaagcttcctgaggccctcaccagaagcagatggcagcaccatgctttctgtatagcttgcagaaccatgagacaacctaaacctcttttctttgtaaattacccaggctcaagtataatgatgtaagaacacactaacacagtccctgttgtcacaaatggcagtatttccttcttttttaaggctgaataatatttcattgtatgtatatgcaccacattttctttatccattcattcatcaatgaatatttaagttattaccatacctcagctattgtgaacaatgctgcaatgaacctgagagtgcagacatcctgttcaagatgctgatttcacttcttttgtatttccaccccagtgtgggattgctgaatcatatggtaattctattttaaattttttgaagaacctccatattgttttccatagctgctccaccattttatattcccaacaacaatgtacgaaggttccaatttctccacatcctcaccaatacttgttatcttttgtgtgtgtacattttaaaaaataatagccaccttagcaggtgtaaggtggtatctcactggagtttgatttgcatttttctgataattaatgatgccaagcaccttcgtatacacctgttggccatttgtatgccttctataagaaatgcctatccaagtcttatgtcaatttttttaattgagttttttgtttgttttgctattaagttaagttgtaggagtttcttgtttatttagacaattaaacctttatgagatacatggtttagaaatattttatgccattccataggttgcccgttaattctgttgattatttcctttctgtgccgaagctttttagtttgatgtagtcctacctatctatttttgcttttattacctgtgcttttaccattatatccaataaataattgccaagaccaatgtcaagactttatccttatgcattctttcttctaggagctttatagtttcaagttttatgtttcagtctttaatccattttgagctgatttttgtgtgtgatataaggtataggtctaatttcattttttatgtgaatatccagttttcccaacacaatttgttgaagagctattatttccccattgtgtattattgacacccttctcaaagttcagttgaatatatatgaatagttttggttttggcctctctattctgttctattggtctatttgcctatctttatgccaataaacaatattttaattattgtagctttgtaatgtattttaaaatcaggaaatgtgatgccaccagatttattcttctttctcaagatcattttggctattctgggttgacaaaatttaatacaatttcatgataaaatcactcaacaaactaggtatagaagaaatgtaccttaatataataaagaccatctatgacaagctcacagctaacatcatactcaatagtaaaaaaattaaaagcttcttctctaagatcaggaagaagacaagtatgcccactctcatcatttccatttaacatagtcctggaaggccgggcaggcgtggtggctcacgcctgtaatcccagcactttaggagtccgaggcaggcagattacgaggtcaagagattgagaccatcctggccaacatggtgaaaccccatctctactaaaaaaaaataataataataattagctgggcatggtggtgtgcgcctgtagtcccagctacttgggaggctgaggcaggagaatcgcttgaacccaggaggcagaggttgcagtgagccgagatcatgccactgcactccagcctggcaaaagagcaggactccatcaaaaacaaaacaaacaaacaaacaaacaaaccatagtcctggaaattctagccagagcaattagggaagataaaataaaaggcaaacaaatcagaaagaagaagtaaagttatctctgtttacaaatgatataatcctatatgtacaaaaccctaacggcttcacgaaaataaactattagatctaataaagtaattcaggataaaataaagttgcaggatacaaaatcaatatataagaattagtaacctttctatatatttacaatgaaccatctgaaaaggaaattaagaaaatacttccttttacaatagcatcaagaacagtaaaatacttagggatagacttaaccaaagagttgaaaggcttctacactgaaaactacaaaatactgatgaaagaaatcaaagaatacacaaataaatggaaagacctttcatgttcatgaattgaaagacttagtgttcaaatgtctgtactacagaagtaatctatagatttgaagttatctccattaaaatctcaaaggcattttttacagaaatggaaaaagcaatcctaaaattcatatggaaccacaaaaccttctttactttaaagtaaactgattataaaatgtttaaccacatatataaaatagatgattgttgtttgattgaataactgggaactgctagccagatagccttgttgacacatgaagctgaccatcacaaaaagctagtgtacaataagttggcatagcacatttcttttaatgggttcaaggcaatcataaaacaagagtaggagggagtaacccgatccctcagacccacttatccatgcattctacagacagagctgaagaccccagggacaatgcacagactacttggctttgcatccttttgtgtggaaacagtgagcaggttcttcctctgtactgtttggtgtgctcactaaaccttagaggattctagtagtttacagtttcaatcaaagaatggggattttacacagagcagactcatgagaccttgattctaagttcctgcttctattaagaggtagcatggcataacaacaacagtaacaaatatatatacatatatatgtgtgtgtatatacacacacatatatatgtatatcagctatgacattagacacctgggttcagatccacttttgtcacttaccaggtgtctagtcaagtcacattccctctccaagcctgtaaattgcacctgtaaatggcagttaacctgtaaatagtaataatattgtcgtgtcatggttattgtaaagaattaaagaccataaacacaaatggcctgggtttataaaagatgctcagttaagacaagctatgatgcttaacttcctttatttcaaggattacctagtgttagttgtgtagtttcaggaaagttccttcatctttctgtgcctcagtttcctcatctgtaaaataagcatacaataagttgttctgtggactaagggagttaatatgtatgaagtgctctgaacaatgtctggcacatagtacgcactatatactttttaactattataatttgtgtttgtgtggtagtgatgaaatcaaggaggtacgaaaaccagattttagtccactctgtactgggtgaactggcagaagtcacttatctgtcatcaattttcttttctgtaaaaggagggggttaattagactatctgtcaagcttatgcatttttaaagatattatacctaaactgctctgtgagatgtaagaacctgagaaggttttctggcttgtgatagttttgaggtgctatgctctcacagatgtgtcaaggccttcttattgattcacaccaaggactctgcctctgtctcagtttttctgcagggtggttgatctgtttacttttcaccaagatgcgttcctctgtcagctgcatcagagctgtcataagccagcttcatgccagggagagaaggaaagacagtgtttttattggtctgtttcactgtgtctttcttcctttgggatcccttctcagaaaggtcaaaataaaattctgcaactgccctgatgaggaatgctagctgattgaagaaagagacccctgtaagcagcactgcctgctgctgagaggcccctgatggagttctgccaagcctgactcatcctccagctcagggaggcctgctggtcactccctttctgccccagccagagagcacattgcaaacatcttaaagacttgaggttggcagcttaagggggaacagtaattcaccaaagcatgatggaaaatctaatggagggcaatgaaggggtgaatgggatgtgtgccctgtcccctaaagaagggaactcctgctctttcccatttcagggtagtgttaaaaaaaagttgctcccacttcttttcttctatttgcttctgcctcctttgcctttttatttgctccttccaaaggtaaaagactaagtatctgatgtcagatgcaggcattcagtgagctgtacttactatcaggcaaagttatgagcctcaaatacaagggcccagaaaccactcttcttcctctttctatgtctaagcccagcaagatttcttctgctcctttctccaggtaaggagtgtgtgaatgccagggtcaataaggaggggctggcacaaagagagaaaaatatctgattgtaacagcagatcaattcagtgttctacaatgtgatgatcacagtgcacatcctgagtgattttccaaattactgaatcatttacttgttccactgttcattgaaaaatgaggtagaacttcatcctaccttgaattaaagggcttcccatcactcctgtcaaagctacattgcattgcatagcatttcaagcagaatgagctaagcctttcattgacttcattttgtatcctttgtgactagaactaatcttagcatttctgaattagaagaaagtttaaaaacatcccaccaaattttccataactgtctgcttgactttactacattttttgcatgtggtcctgcagtttctgcttgaacatttccagcaataaaacactttttaacaaacagattcctttgtttggtacaggtttattggaaaatacttcctttgttatttctttgtaacctcttaaaattctgtttttcctacttttggaatcagaaaaaaataaattgtaatgcctattcctacgatagtactttaagtacttggatggttcttagactaagttatgctgcagtaatctcagtggctgaaaataacaaaggtttatttcctacccacacataggtcatctgagagttctgtactaccctcacttagggactcaggttggcagaacagccatggtatttccgtggagctccactgctccacagtatttctgtagagttccacccctagatttacctgtcaagctgtctctccacagtcctgctccccattcagttcttggtcattgcagtgggccatctcatgctgctctctggtctgctttgtccccacaacatggacacagcccctctcctttattctccaagtcaccatcagcataatgatgttatgggtagcagatttgctggagtcttggggttaatggaagaagggcaaattgggagaggggaatggaagggtgacgtatataaataatctcaccttgaaaattagacatcatagtttccaaaattccttgcctgtctctcccctcctcccaccccaaacttgggtccatcttcagccctctgaggaaacccaccctaatttcttctcaattctcatgtcttggtcccacctctgtgtctctagttgttatcaaagagaaaattcaacttgaccattacctttttcagcagagaaatgtagctccttttgtcttaatctcttccattcttatttattctaatgaattctccttcctaaccaaagggcttcttaatatttcttaggcaaaataattatctgccaaatcctccatatttaaagagatagcagaagctgagaaattagtttttcttgatgtcttaaaaaggtcattgcaaatgtttttcattcctaccgaccccattttagagaaactttcaaagactgtaagtgtgagggttaatattaggggtcaacctgattggattgaaggatgcctaggcagctggaaaagtcttgtttctgggtatgtctctgagggtattgccagaggagactgccatttgagtcagtggactgagagaggaagactcaccctcaacatgggtgggcactatccaatcggctgctagcacggctagaacaaagcaggtggaagaaggtgttataaccttgcttgcctgccgagtcttctgatttccttctttttcctaagccagatgcttccttccactctttctgcccttggacatcagaatccagattctttggcctttggactctaggacttgcatcagtggcttcctgggggctctcagaccttcagccacagactgaagcctgcactgtgagtttcccgggttttgaggcttttagacttgaactgagccactactggcttcccagcttgcagatggcctaacacgatgggactttgccttgtaattgtgcgagccaattctccccaataaacatcctttcatatatacatatatcctattagttctgtccctctggagaaccgtgactaatacagtaagcatggatcataaacggtgaatttggaagtactgagggagtcagatcatgaaagaccttggaagacctgctagcctatatacattttgattttaagcagggaattaacataattagtgggttataagggggataggagtacaagtgagacaaggagacaagctgggagactgttgtagtaatgcagatgagaaggagcagtaggaatagacagaagtgctggagtcaagccatagttaggagacagaatggagaggacctgatgtgggagggtgagtggaaagaggaatatcaggaatgatgcccagttttctgtttgtagtaactgaatgagtgttgatgcaattcactgtgacagaaaataaatgagtaggaataaatttagggggaaacaatgtttcattttagacagatcatattatagatctatgaggcatcctgcaggatctgggaacagattaccaagtcagatttttcaggcaagaccggccagtgggatctgcgccctgaagaagaactaagctgcctcttagatccccaatattccaaggaaaacctctgagcaaaaggtcccctttgctgccttgatcttatttgaggtctgagcttctttcctgcaaatctttggcttaagatgtagcaatgatatctaaagtgctgaagactccaatccagtctccaccctgggagtacgtggagacctcctcttcacttagatgtgtgaccaagcacagggattgctgctgattcagtctagtcactctaaaaagtatcactcgagagctgaatatttagcccttttgttagaagtgaatggttgcatcttgtgtgtgatgggtgcataatatttaccagtgtggtaaatatctggtattgtctgtgcactattttccaaccatttttcacataggtacgtttaaagattttttgccttcctaataatttttgttgtcattgctattttgccttcagaaaaaaaaatagaaaaagaaaaatgtgattaatatggccccattcaaatcatgaagcaggagctgccattgtgaaagctatatagatggactcaggcacctaatgccaatgtaaaccagggaggctacctgctatgcctaaaagagtactggaattggaagcagggcacctgccttcaagtcccaggttttcattcactagaaggtccctttggcaagtcacttatctcccttgggtcttactggccttatctgaaaaatgggcagatcattgtagtcactgctgcatcacagggccatttgcagattacaaaaagtccaagtaaagggctatagaaaccagaattacatcccatatgctccaatcttagactcccaggctttggttccagaccaaacatctttcatctactctttctcctaaagttaacattgccttcagctgctgtggctacattcttaattttttaagaaagatcattgttttctcttacagtgcatagtatgggactgggactccaatggcaagcatgacttcattggagaattcacctcgacattcaaggagatgagaggagcaatggaagggaaacaggtacatggtcaaccacttttggttttgcctccagtcggtatgatgcatccttagaacacagctaccaatgaaacagcaagaggcaaaacatcaatgtatgattaagtgtgataagaagggagcatggtaggatgtgagtatctagattctagaactagcccaacccaaagcaattgtgtgtgcttggacaagacactgaccccaaacgttacagtttctccattagtaaaacagaaaggttagatgagagtatttctaacttcctttacctgtgtagccctgaaaagtgacttaatctctccatgcctcattttgctcatctaaaaatataagagtgataattgtacctacctcatagaattttgtgaagattaaatgagacaatcctaggtgatagcagagcgcctagcacatagctagcatttccaaaatatctgctattaacagtagtattccttctaggtctatatttccatgatttggtgacattaataatactttcatgccttggagaaattatttgaatcctccaaattttcatataggtaccaggttttcttctagttccatcattttactcttacacatttgatgccaagacctgtacacaagcactaccacataccactaagacacactgtcccacacagaaacccaaaccccttctgtgtttccctcagatacacacactttcatatcatataatatctagacagacagacagacagacagacagacagacagacagacagacagatagagatagaaagtcatctgggcccaaatcatgcaacttctccttttacctgtttattgttcacctgcccaatttccagctgaaatacctctttgcctggcagatttctctatctgctggagcctgttttatccatgcccaaaagcaagatagaagtgtggaaggagatgtaacaggaggtagccctcaacaaataactaatggaagttgggatataaataccccagctcccttgcccttcagttggcaaaactctgaggtgtatgctctatacagtttcccagagttctccagcaggccctagttatccacagtggtaactgacttgataatgcaccctttctgggatgcctcttctatctaatttctcactcctctattcatgcttcctggtatcacctcccagatggcctacttgcacttatattcttgcctcaaatttgcttcttggggaactcaacccaagacacctgccgttcttactctggagttcactgtcctcatggagcagaaaggagtgaaagcagagggctcagtgcttttgagaaagtctttttctttagagataatactctgtgcctgttctgatcagaagtgctaattagagatgcctcaactcatttttcagctctctcatatgtaaggtcaggatacagtcagactggatggaaatgaactaacatttttttagagtcagaaacttaatctgaatgataccatttgttgaacacatacctttggtctggaaactcaatggaaacaatggcagctttccacttagttcctgcaaaacctgctgtaaatgctctgttaggtactcagcattacaagaaacttgtcaaacacccagagaccatcacccacaagccaggatgcagagtttcagagccacagttaaaaccaacactaaattataagcaaagtcattcccaagataacaaggaatatagctagagaatattgctctattgaatatgcagaactagtcctatttagctgctaaatcaatgatagcattcataccacctgctagagttctaaaaagttttataaagttttgccttatccacttctatgaatagaaatagtccaagcagtaaatatgggaaatatttcatcttattaattaaatattaaaagtaagaatgtaacacatatcataaatgaaatataccaaaacctaatgctttcaaacagagagaaatcgtttaagttccactgaggaaatggaccatatgctaatgtgcttttctgaatcactgagctaccagaaaaactttagtttaactacccagccactgttttggtgtagttatacagtgggaaatattgtcttatttattgtttctacaatatttatcgagtagcacctagtaaattccaagcactgtgacaggctctaaatgcaccatgactaacaatgctgacatggtccctgcccttctgaagcttacagattggtgggagtcaggatagaatgtaaacacaaatttaaaaagttaaaatgcaactacaatttgtgacaaatgctattacaaaactaaaccagtttcattataaaagtgtgcatatagaaaagataatctgacatttaagttgaggccccttaatgattaaaaagaagccaatatgtaatgagtgagagaaacgcatttgaagtaaaaggaatagtagtgcaaagtacagaggcagggctgagcttggtgtgattgaggacctggaaaaagaccagtgtatctgaagcagagagtgaaagaaccattcataggatgtggtcagatatagaggcagaggccaggaaaagcagattcttctaaatgtgataagagcatgtgcaagctgtgctttcctatacattagccactagctacatgtggctatttaaatttaaattaattaaaataaaattaaataacaagttaagttcctcagtcatgctagccacatttcaaatactcaatagtctcatgtggctggtggctactatatttgatagtgcagattcagaatattccaattattgagaaaattctactggacagtgctgcaaagtgttctagctagagaatgacatgattggttttaattttttaaaatattacttttgctactgtgtagataattaaagagagacaagggagatctgttaggaggctaccactatagataagaggtgataatgacttgggttaaggaactagtcatagagatagataaattggagagacttaagacatattttggagatatgagctacaaggtttgttgaaggcttggatatagggagtaagggaaggaggaaatggttgactcaaggatagattattaaattgtgccatttcctgaggtaaggaagaattgtggtagcgaggtccagtttatgaggaagttttcaaaatttggtttcaaaaactggtactcagaggagaggtttacccgtaaatatattttaggagccatcaactaagagaggacatttaaaatcaagagaatggatgagtacacctagggagaggggactgaagagaaggtacaggaggctcgaaccctgaggaatctcagtatgtagcatcagagaaaaaaagaggagagaacatctttcaactttccttttcctgtgggagttatgattctataggtacagggtaaattcttaattaaccttgattaattcttgaataacatttataagtatccttagtttggggtggccaaaggggatacttgcaagaataggagagctactccaagaccttctagaagaaggcattgtggttaatagtgcaggctttggaatgagactgatgtgggtgtgaatcccaggtctaccagttactacctgtatgacctgggaaagttctttctcttctctgagcctcatcttccatctgtcaaagtgggctgtggggagagttaaatgggattgggaaagtaaagtgcatagcccatagttatatgccaacttcatcccaagacagatgcaaactatttagatctggtccatcaggaccccctacccacctcacaagtacaaggaccccaagtatctacgggtttgattcaacttccttggagccctctcctgactaagccaacccatacttgctcatcttagcctgagaaggaagtgagtagacttttcatggatgatcactataatttttaatagaattcaaaatctttaactcaatatatcctgcttgatagaagaaattgagattaatagaaatcattgagaatgacaaaaaatggcacagctaattttagtgtcttttctttccaactgtttggtaaatccctaaaccacctgttttactgaaatattagaggaagctttggggcaaaagacaatatcagttttgataggtttgggaggaacttgggctcttttgtccagaaatactaaatctactttgagatggactataattcttgtttatcaagttctacccacttggagagtaaatgagaagaaaatctgagggaggaaagaaagacaacattcattatggacagattaggagattaggcctttaaatgacaaaaacaaggctaggggtctgattttagattctgctttgaatgttttcttctttctttctttcacccaagaattccatattttgaaggagtcatagaggactcttcactggtataagatctccctcttccaaatcctatgtagttgcccagtcctgctggcaccttccagtgatgagaaactacagtatcagttatctgttgctgagtgaaaaaattagcccagaacttcctggctgaaaacaacaatcactatgtactcaacattcgctaggttggcagtattggctgaattcttctctgcttcacatagtgctccacgtggtgccaacagaactcactcgtgcatttgtgcctcagcagccaggatggccaggatatttctccaggtatacttttatcctcctggagaccattgtaggctttttaatatggccctgaaaacttcccagaagcaagagaggagccagccccaatacacaggcgcttttcaagcctctgcttatatcacatttcctaatgtcccattggccaaaatgagtcatgtgactaaatgcctcatcattgtgggagggagctacacaaatgcatggacactgagaggaatagattatgggaggccactgctatatcagcctatccatttgcacctgcctcagaaactacttcattttcagacacttctaattctcaggtagtgaaattttgtctcttgagtagaaatccagagattcagctttcataggttggtgggcaggaacattcaacaactcttggatatttgattcacaattggttttgtcccattaaatcttctgtaggctggagacctattccccttagttcccagctgactccttaattcccagccactcctgtagctctgatcttatccttcaaaaaggcccctttggagatctactgtgtcacttttgggacataagccaatccattattttagttctccatgaagttctatgttaatttattattgtccctagtaaatttctctagccagcattcactattcctaaccttttgagtcaattctcaggcagtaagccttagtacttggtcatcactcaactgtgttcctgcagatttcttcttccctgtactgctttatttgaccatattaatagtaagcattgacatgtgccaggccctgttctaaatttattacaaggattaatcagtcttcacaataatcctatgagatagagtataattataagctccattttgcagagaagacattcaagacatagagcaatcaagtaacttgccaaaagtcacataagcagggaagcggagttgctggggttcaaacctagaagtctgacagtgagtatcactctcaaccactccccctattgctcctctagatgcaagagttaccacctagagactatttgtcagccctccagttcagtttgtcctcagcagcacctaggagcttggccttattgaaagactcagctttttcctgaacagattctcatgctatgacccttctttcaggtgcagtgggagtgcatcaatcccaagtacaaagccaagaagaagaattacaagaactcaggcactgtgattctgaatctgtgcaaggtatgtacacaaccctctcttccaggagtatgaagctagggctatctgagaggaagagttcaggtggtgtggtcagaggaaaagagtatcaaaaagatgtgatcttttaaaataaaaattaaaaagtcatgtattaaagaacataaaatgagaaatgtaagcatgggtggtcatggagctgtggcagcgcagtgtcactgtcctctccccagggacagtcctgccccaaagacaggagagttccgctgataggttaggatcatctctgcccagagcagtgctagagggagatctccaaatggggaagccaacatttctagaacacctactatgtgcccttcacggtgtccagtggttgttttgtttggtttggtttggttttggttttgtttgtttgctttgttttgggacagagttttgctctgtcacccaggctggagtgcagtggtgcgatatcggctcactgcaacctctgccacccaggttcaagtgattcttctgcctcagcctcccaactagctgggactacaggtgcccgccaccacgcccagctaattttttctatttttagtagagatggggtttcaccatgttagccaggatggtcttgatctcctgacctcatgatccgcctgcctcagcctcccaaagtgctgggattacaggcatgacccaccgtgcccagcctgtccagtgttttatatgtggtaccttattcatactgaaagcgtaccataaaaacaagacaacaggcaaagattaaagggcttacgaattccttccagaggggctacaactttgcagagaatcacatgtgctaataattaaacttcttaactcaaatctgggagtgatgctgacactagttgagtacttactatgcaaaaataactataataaactctgtttaattcttaccacaaccctgagatgtctactttcaattgaggttatgtacctagctcagagtcacacaagtagtaaatttaagagctgagattttaacccacgtgtctctgactcctccatacaggactcaattgctatccagatgattgttgtgtgtgcatgttgtgtgtgtgtgtgcgtgtgtgtgtgtatacaggcatacatatatgtgtatatgtatatgtatatgtatatgtatatgtatatgtatatgtatatgtatatgtatagaggccaatgtcagggatattttgggttctattccaaaccaatgcaataaagcaagtcatacacattctttcatttcccagtgcatataaaagttatgtttacactatactgtagtctattaagtatacaatagcattatgtctaaaaatgtacgtactttaatttaaaaataccttattgctaaaaaatgcaacagtcatatgagccttgagtaagtcataatctttttgctggtggaggaccttatctggatattgatggttgctgactgatcatggtggtaattgctgaaagttggggtggctgaggtaacttttaaaaataagacaacaatgaagtttctcattaattgactcctcctttaatgaaagatttctctgtagcatgtgatgctgtctgatagcattttgcccatggcagaacttctttcaaaaatggagttaatcctctcacaccctgcctctgctttatcaactaaatttagggaatattctaaattatttcttgtcatttcaacagtgttcacagcatcttcaccaggagcagattcaagaaaccactttctttgtttatccatgagaattaactcctcatccattcaagttttatcagttgtggcaattcagccacatcttcaggctccacttataattccggttcccttgctatttctaccacatctccagtttgtcccaccagtgaagttttgaactcctcaaggtcatcctagagggttaaaatctacttcttccaaactcctattagtgttgatatttcaacctcctcccatgactcatgaatgttcttaatggcatctagaatcatgaatcttttccagaaagttttcaatttacttttctgagatctatcagaaaaactaccgtaatgatagttataaccttatgaaatgtatttcttaaataagaagacttgaaagttgaaattacccctagattcatggggtgcagaataggatattgtgttagcagtcatgaaaacaacgataaaaccccttgcacatctccatcagagcttttgggtgactaggtctattgtcaatgaactgtaacattttgaaaggaatctttttttctgagtagactcaaaatattcagtaaatcatgctgtaaacagatgtgatgccatccaggctttgctcttccatttgtagagcatgggcagagtagatatagcataattgttaagagtgctagaatttttgaaatggtaaatgaacattggcttccacttaaagtcaccagctgcaatggcccctaataagaaagtaagcctgccctttgaagatttgaagccaggcagtgacttcttctctctagccaggaaagtcctgatggcatcttcttcttccttgttctacaatgaaaatccgttgtttagtgtagtaaccttcctcaaatgattttagctggatcttctggataaattgtggcagcttttccatcagcatttgctgctttaccttacacttttatgttacagagacagtttctttccttaaacctcatgaaccaacctcctctgctagcttcaaacttttcttctgcatcttcctcacctctctcagccttcatagaattgaagtgagttagggctttgctctagattaggttttagcttaagggaatgttgtatctggtttgatcttttatctaaaccactaaaacttccttcacataagcagtaagcctatttcacttccttatcatttgtatattcactgttttaatttcaagaacttttactttgcattcacaacttggctgtttggtgcaagaggcctaacttttggcctacctcagctactgacatgccttcctcactaagtttaatcatttctagcttttaattttaagtaagagatgcatgactcttcctttcacttgaacacttagaggccattgtagggttattaactggcctcatttcaatagagtagtgtctcaggggatagggagacccaaggagagggagagacatgaaggaatggccagttggtggagcagtgagaacacacacaacacttatcaattaagttcaccatcttatgtgggcttggttcatagcaccccaaaataattacaacagtaacatcaaagataactgatcacagatcaccataatagatacaataataatgaaaaagttggaaatattacaattaccaaaatgtgacagacacaaagcgagcacatactgttgggaaaatggcaccaatagtattgctcaatgcaatgttgtcagaaaccttcaatctgtaaaaaatataaagctcaataaagtgaggtacaataaaagaagatacacctatacatatatgtgtgtgtgtgtatacacacacccagatggtccccaatttacgatgactcaacttataattttttgaacttatgaagggcttattagcatgtaaccccactgtaagtccaggagcagttgtatatacatgtatttatgtatatatacagtcatgctctgcataataacattttgtcaatgatggaccaccgatatgacagtactcccataagattataatggaggtgaaaaattcctatcacctagtgactcatagccattgtaatgcaattactttattttttaaacaaattcagtgtagcttaagtgtttataaggtctacagcagtgtatagtaatagtctaggccttcacattcactcacctctcactcactgactcactcagagcaacttctagtcctgcaggctccattcatggtaacttctctatacaggtgtgccatttattatattttataccatatttttactgtgcctttttatgtttagatatgtttagatacacaaagacttacagttgtgttacagttgcttacaatattcagtacaataacatgatgtacaggcttgtggcctaggaacaataggctataccacatagcctaggtgtatagtgggatataccacctaggtttgtgtaagtatactctatgatgttcacgcaatgataaaatcacctaacagtgtatttctcagaatgtatttccatcattaaatgacacatgattgtatatatgtatacgtgtgtgtatgtgtgtgtttatgtgtgtgtatacatacatagatatatgtttcctaacatattagaaggaacctaatatgtatatatacaggaccatatccttacataacaagatagtgaaggaaaagagtaattggtctgctttgggtcatatccctaccctttacaccaattgctgggactaggggataatgtcttatgactggccattgtattaatctttttttttcaatattttttgatgctttgacaactttgggccttatgaacctaagagggactactctcccagtgttagctaattcctatagacagcaaacaacctgccttttagcatgcctttgatatacaaaccaatcattttttagttcaaacccccaatcacctcccttaccaaactctcacacaccaagccaatgttctcccaccttatatgcccctagggtcaggtctcacataactagaaaccactcacatggttttgatagatttcaaaacctgctgaaatcgttcaaactatccaatcctaggcctgcttagctgcttaccctgccttgcccactcctgcctatgaaaaaaaaacacacagtaaatggtttgcccatgctttcccttcattgcttttgcttcctgacctatcctggtgcttccccatgtgaccttcctttgtggcataacatgcctcctatcctttgaagaactgtgagcaataaactcttcttacagatacagacatctgtctccatgtcaggcatcttatcataactgtacaaatcaaatcctgggtacattctaaacagttatgtgactatccttgtgctcaaagaagcaggagaaaagatctagattcaatggttatctttctccttaaggtgactgtgtacacacaattttttttttcttccatgagttgctcttagagttcagtgctcagaagcactgttattttgctcactttcaagttcttatttctttgatatgcagacacagtagcacagtgtcccaactatcaggcaaagcattaccatcaggacaccaaaagtaagcactatttagaggccaagtgaacatcaattctaagaaaagtatgccaatagatgtgtgccacctggaggtggtatctagagagaccaacactgattttttgggtctctctaagaagcttcctgagcattagatggaatctgagaagtgacagtcaaaaattacagttactggctgtccaggtagaaggatccagactgtaagtactgtatgtgtttttctaatcactgtagtcctagaatctagtgcatagtgagtattcaataaataattgttgaataaacgaatacatgaatatcaccaagagccaagccaagcagcaaaatcacaaagaaatgtaaattaagaccagaaatccctaaggtacttgagaacacatgatggcagttggcataacgcaacaaccatactgacttccagagtagaggtcaaaaggacagagtatgtaacccagacttgcatcatttgagtctcaactctaccatttattagcattgtgatcttgaccttaatttcctcatctataaacagggtacaataataatagttgtgccaccttcataggattgttctgagaattaaatgaggtaaaagatgttaagtacctgtcattcagtaatgcccaataaatgttagtcattgttgttcatggcaggggaagcatttaactaactggaaattgtcagtaaattaccttctcagccaatggtattttaaaactgcctatctaaattacctgcatattaagaatgtcaccaggactgggacttagacacagggaggcaagactgaagtcaagtgtgagacatcattgatttcaaaacagtagtgacacttgaaaatatagttttagtctcacttcagaggcataagctgattaaaatttgcataaaccataatagaggggagcaatggatggatattggcagcattcataggcccatctgtattaatattgctttccttctctcctttaacagaacaaacttaactgacccatcttttttcaatgatgtctgtctgccctttcctctggtttagcagcttatcagtcaccaacctttaggcctccaatatatcaggaaatagactgtgctgttattaacccagtttcctctcccctcctatgcagattcacaagatgcattctttcttggactacatcatgggtggctgccaaatccagtttacagtaagttgttttcatgttgattccttgattcttattcaggaatcaagagatgaggggtggcactgggtttgggggataaagagacaaaagcttattaaaaccttcaggcagctttgttcaagtctcattgttgaagcgtatggtatcgtgtttttgaaatgtgttcacacttctgttttctttaataagtatagttttcagcatcatatcaggaaatttatgccactcaacctcaggtggtctaggaaatcctcctaacgcttcccatttcttcagtaactatgtgaggcatgaagcagagtagcctgtcagattccatcacctggtgagaaaaattgaaaggaagtaagccaagcaagtaagttccactgagccaaggcagatgccatggttgtgttcatgtgactagaccacagcaccaatgtcatacccagtagtcgggaccaagagtaagccatacaaacagttcattaggcaatgaaaagatgaattccaaagattggagaaccaggccgaggtcaaggttgagaagtagagtgggtgtctagactcagtgaatggatcaaggatcatcccctgtatgtaatttgtgtgcccttgggatttacacacccctgatgtatatttgactgggtaggctgagtctttttaaagtgcctaggtaggtcaaggttgtaagtccatctgcactggaacaactgactttcactgacttaatattcaaaattctcctaggtttggtcagatgtgacttccagaaaaagaatccccagatggcaaaagacagatgtgctagaaccctttggaaagcaatgtggacgtaaacaagagagatgtaacttgtacagcatttatttctcatcttacagaaatgtactaacgaagctcagccctgttcagctccctgactggctcagtcatttgaaaaaaggaaataaaatgggtttaaatttttagtcaagctttgggcccaagagagtagacgggacctatatattcctggaaccaaggaagatggtgctcaaaggactaaaaggagtctcaaaggatgagataaatggtcatttactaaactagcttctccttagctagggaagtatcctctgccctaatctcagggaggtatacctatgtccttcctaaacttggggtattgtgcatttatttctgaacgcttacaggagcaaattttagagtttggtctcctctttaaagtctaagattctctaatgcacagccagcaagccttcctacattcacactgtcacatacagaaggtagcaagcatgttcgctgaggatacacatctaactctagctgtcctgtgggctcattgctgctctgagcatacccatatggaagtatggaagcaagcaatgtcataaaggagagctactggaaatagtttcccaagatcttaggcaaaaacgtgatttcaggaaactatttatagcttttcaagggaaagctctattgatttcagtctggtttagattttgtagatcccatgctcttgaacaactctgtattcaaccttcaggggcttgctctgcccttcaaattgtgctgcaaagaatcagccccaacaaaaattaggtgctgaaccccaacctaaagtgttcccagctccacatcctgactttcagatatccctgtgccctgcattgttctcccctcctttctcagtctgctgaccttcccccactgagagtaccacttcagtgtttgtcaccaacaacaccccagttgcagctccccatgccctccagtgtcaactgatagacctgtgggaggtgtgagtgaggagagcagtctggagcaaggaatgagaagaggagaatgtacagatgaatgctgaggagaagggggcagccaacaatagttcctccccacagcccttcctcctgtagggtttcaggttggggactcagaagagaattgctaggtattctattcccagtgttctactaaaggaaacataccagtcacttctatgtcattttcttccaaaatgaagtcagctttctcattctaaatgttttattgctcaagtggtgcaacttaatttaaattataagctgtaatgcaaatcgttaagaaaaagtatcgtgtcttatttaatttggtctgtaagtgtttattatctgcctggttattttactgaaaccatctggcaacatgaaaaggaagtggcagagagatgagaagtgaagagaggaaggtttcctggcatggaggtgggcagaggagagagagaaaagggatgtttcattgcagtaattatacctcagaggctttcagaggcaaaaacccccattggcacattatgtgacccttggctcctgagcaaccagggagctttagccaacacaaactttttgtctccctggagaaaggccttcaagcaccagaggtgacataaagttctggatgttctccatttcctcccctagagccactttccatccttctccactctcccttctgtgccccaggaagcaagcctccttggatgcaccacccaagctctccagctcttagcttttggttggatttgaccaacgagaggcagccatcagagatcaaagaataggaggcgagagaacttgaaatatttatttctctagctgcctgcctgctaggctgtggttgggcagcgaccttcttcctgacagaaggtcacagttcctgtcaggtgccctgtcctgaagatactcctcttactgaattctagtaactgctccctcccactctttctggtcagtttccattaaccttttccacatgtttgtgaattgtccctttattaaacttcctcaatcaccttttgagtggactttttgtttcctgtagtggctctgaccaatacaaaatataagcaggggctaggagaaagcctttgtatcttccatagatgctggtgcttctggttcaatcttaagagtgttaaagatgggggcatctttctcctcagctgctaagctgctcaaaatacttttgctgaattgtaataattgaaccctaaaccttcaaagggaggttagatttagaaaaaagaacaaattggataaataaacatgatattggggttttgctttaaaaagcatcccccataaacttaagtatttatgtaccactatattctaattataaatactaaaaccttaattaggaaaatgaataaacaggatgtatttaggggagtattggggaagcagtttggggtcagaacttgaagggctttgaattttgaggtaatttggtggataatgcatgttccaaaggatattgacgagggccttgaagcaacaggcacatgctttcgacaagtaaacctgggtgtttgatggtggtgatgggggaacgagagatgaagcaagcagagatggaagcccactgccacaggcctggtaccaggtaaaaagaagctaaacaagggtggcagcagcaggagaggtactgtggaaagagaagcactaagcctctgcctagaatacaatgagaagactgaaagcaatcaaagcttttgtgcctgactgacagagcatagtggacctggtcagggaaatacgcgaggcaacagcagctgtaggcaagatgatgaatttggctttggacacgtcagaggtactttcaggtatcccagtggagatggtacttataaatatggacctaggtttcaggggagagtcaggagctacatgtatgtggctttggatgagatgtcccaagagaaaaatatagaaggaaaaggggcctgatgacaaggaattgtagaggacctctatctggcagcagaggaaagaggggcaaagagttaagagaagaaatgccagaggagaagaaggcccaaggggaggcagtaactcagatgcccaggaggaaaaagctaaggttaagatcaagggcaacaatcttgcatgctaaagagaagtcagagggtgaagaacaacatgatgagtaggtaggtgtatatcatcttcaaaagagcaacttcagcataacgagataggtgagacccaggagttagagtgtaaacagaaggtaaagaagtgaacacagcaggtgtaagtattcattcaagaagttaacagtgaagggaaggcaagaggtacaaggaggatggcaatttaaagattaaaagagaagagattttaagctagaatcagactataagcagaggtaacagcccagtggaaggaaagagataaatgatgctaaaaagagccctagacagtcaatgattcttattcttttttggtcacctgaacacttgagaatttgatacatgatctatagcctcttactgggaagtgcacacatccagttttgcatgcaattttgggaggtcaagggcactcctgaagacagtccttgtacctcacatgaatccttaagtcataagaactctagagcaactagtattgcagtctttgaggaggtgggtggaggtgaaacagaccacagggtgagagattgggtttggcacatggtagagcagctaaaaataaaaccagatactagaatttcacacacaaaatacaaagttatagataacacaaaatagacagatgccgtacagtatttgaaaagaaaaaatgggggagatatacctaatgctagatgacacgttagtgggtgcagcgcaccagcatggcacatgtatacatatgtaactaacctgcacaatgtgcacatgtaccctaaaacttagagtataataaaaaattttaaaaaaataaataaataaataaataaataaaaagaaaaaatggtagaaaaatcaaaggtttttttgaaggttattgctttttcatatgctcaaaaatgttcattgtaacacagatttttacacaggcactctgtcagcaacctaaatgtctaacaataaggtaatggctacatgaattacagtattcctttaaatactatgatatttattatcatagtatttagttatttagtattgactatgataaagcctatttaaattataattctaaggtttagataataacatgaggtcatgtttatgacatagtgttacaaaaacgtaaagcagagttactctatgattacaactatatatatataaaatacctagagaggaaagaaaaataaaatatgacttaccagcctagtggcatggcgagtgatatttttttcttattaattttaaacggacatttcttttgtgtcatttttaaaaattgaagataatattgctttctcttacctctgactatagtttatattttagtaatataataagctgctgaatgcaacttctcccagactgaccttcaaacctaaaaatttagatcactcattaaaggttctctcaggaaatctttttctttctttctttctctctttctttctttcttcctttcttctttttttttttgtttttttttgttttttttgttttttgaaacagggtctcactctgtttcccggagtgcagtgcagtagcacactggaagctcactgtaaccttaaactcctgagctcaagtgatgctcttgcctcagcctcctgagtagctgggactacaaccatatgctaccacactggctactttttaaaacaaatttttgtagagacagggtccagctgtgttgcccaagctggtctcaaactcctggcctcaagttatactttcatctcagcctcccaaagcactgggattataagtgtgagccaccgcacccagtctcaggaaatcttttctaaccctaaaacatttagggcatcctatgtccacactgtggcccagtttacatttttaaatctttattttacatcccagattgaacactgatctactctggtgtagaccttcgagtctgcttactgcttagtgagccctgcttactgaattcctatgcaaagccagggtacaatgggttaaagaggcaaatgctttgccatttccagaaaatgaaccaagtaagtttaggtgactttccctactttcctatttaactgccctcttagaaagttttctgaaaatagaaaagaataaaaatgtaacattatttaagaaatggtccagaccaaacagtatgttcacctacaaggttcattgtataggtccaaattgtacacagctatttaaaaagaaaagaaagaaagctccccaagaatgtggtcccaaaggtagactgcaggtacaactaaccagaggttgttacacagcagcttcccttagaaaacgtcgagaaggttcacaaatgacctgtttggcagatgaagggaagggatctgaggagtggggttgtttcatgtaagaatctaaaaatgcccaaagaaagatgctcatcatttgcaaccagccttttcccaggaacagctccacacactggggacttggtgtcatggagggggcattttgcattcttactttacaaggtttgcaaagctgctccacagctctgcttaataatgagcagtggcttcctgggcagaaggaaaaagcactgggcacctgttcttgtgctgcctgcagagaagattggagcacataccagaaccacaggtttccataaatgcttcctatcaggaaatgaaaacgtggtggctctgcgagctcaccggtattcagaaaaccaggcatcagtagccacctccacacactgacatttttcagtcattttcttgcttttatttctcaacttaatcccatctttcactgcctccctgttgctttctaaaataaacctaacctttcactctgctctctttctactaatgctaactttaaagagcacagagaattcttggtggaagaccaccccctgaagatagatattttatctccagcttcataaatgaggttttaggaaccactactttccagaaaataaaaatgaaaatattttagctgactcttacttaagactgtccattgctgtctagtcacatgataaaatttttttattaaaccatgagaactataaaatgggctatatggtaagaatcataagcctatttcctttttcatcagttaatttttaagttcataccctcccctaggtcgatatgagaatctcctgagatgaagtggcctctctcgttgtcatagacgtaggggccattgccatgggaaaagtggaaaccctagaggcctgactgaaaagaaataatagtaaaatttccaccaggcatgtttgaatgtttaaatagtagcaccaagaacaggcagcccaatactaaccttctagcattagcctgtaccttgtttcattatcttcaaaatatattattctcttctgtcccctcaaaacctggccattccctttccctaactgacatccaactctgcattcaagtggtcacaaaatcctattcattttctatccttactttcttcaatcactctttccttctcaccatcatctttgccccaccctagttaagcataagaaaattattccaagcctgacaatgaagagttgataggaatgaaaatgacatagtagggtcagtattggaggtaaagcaagagacgtacctggggtgcaaaatttaaggagactctcactctgcggattttgcaagtatagggtctgctgagagtgagtgcctccttgggttttacaaactaggcacttctttttgcctcaccccatctccagctctgatatgtttttttctattattttaaaatatattgttgccacaatctatgtatgcttgtccagacattacacacacttatctagatataacatattcatccaggtgatatactctggctcagatgctgccactaggtgcctgcatgctaggagaattttgccaatgcctaggaatgtttcttgagcagccatttttctttatggatttttttcctctggcctatataacccgattgcattgtctagttttatatcaagacaccagcatgtttttgtcatcacagaacacccttaacacttcaggagtttcagtcagacaaccagcacatgggacagattgttagctttagtatcaagaggcagaagcatgatgccttcagaggtaaggaggtggtgacccatgatggaaggcatcatgaatagaagtgaggtgggccacaaggtgtttgttattaataataaagtagcaacacctgccaatgattcactttttagataaattaaagcagaatcaaggtaatctccataacaacatcttcacgctctctagaattccctggagtactaacatgctttcctcagtggaagagaaaggggtggctttacatctggccttcccagcattacttttaccttttaaacactatgtacacctgtgcaaggtgccattatcccttaaacatgtcccattaggagtaaaaggctgagaatggtgtctgtgagttgagcttggtaaacccaggagggccccaaagatatgattttctcaaacattgtctctcaaacatctctggagtgctcctctcagaaattttcctggaattatctgcatgagtttggatctctatcttgttgaggcctcattggtggatcctgaggtgctcttcacctccttcttgttcagaaaatgcatgtaggttcctctctcccaccagcttttcatcgtagtccttgattaaaagggcctcacctatggtcttacttttttttttttttcctggtgggttggctctcaccttcaggataaacctgtcccagaagacactggactttattggtctccctaggttacctccactcatcctcagtaacaatcatctcactattgtgtgtgcaaacatacatacacacacatttcagttttccttttcttaagttttacacccattttggtcacgaagagtttattccaggcaattcttccccaaattgccatggttgcctcctagcaagtctccctacctccaggccaaatctcctgcattttttattggaataattatacccatgagaagtcctggtgttttggtcatagacatacatgttctcctggatgtatgatggcgtaatggaaaaaggtagaaaggaaccatatagacttggatttaaacccaactccaagccctgttaccctatgtcacatgaaaatggagtaatatcatgcatataaatgaagtaatatcatgccctctgtgtcacacacagttagcacagtgcctgacacagagattatttctctcttctttcctttgttatccaaagtaagggaatctaaggttcagggaagaactgcaatttttcttcagataacctttttttttttttttttacatactcttagtactagcatttatcagtaggcatcccctgattttaagaaatctgggtattctgaaaacagagtttgaatcctaagtttatttttgacgtagttctttggagaggcaaggaagaaaaagaaaaacataacacagatgaacacgtaatttcatgaaagaaaagaaaaaagcctataaatgaattaatgttagcctattgcttttctttcctagtcactttgatttgattgcagggtacaatatcagatgtgactaacatttttttccccatcaacttataccttaagaaacacaaacacacacgtggcatgtgttctctaccctttcagaaataatgttgcaccttcctagaaccaatggtgcattccagttatttgttgtaatgaaatttaccaaatataacacaaataacatttcccattatgattcccaagatcatatgaaaaaatagagcctttcgggcatagtaagccaatgaatgtattctactctaccccagaaggaaatggaattatgcaacataaacatttctttcttcccgtatgacttttattttaaccttcttccctcgaagcttaagtggcatttttaaagagatttttgctgggttaacttttatttagatggtggtgatgttggaaattagaagaagtgtttcttctcattttaacaccctcggcttaagcattttttgttctttcttttgttattaagaagtgttcagtgactcaacgtttacttacatgattatgatactgggggtcagaagaaatttgagaagttgaagcataaatgactagttggtggcaagacaggtttcccttctccacttcccactcacaatgcgataacattcaggcatcccctttgttgtaggcaggagttcttacatgaacgagaaccaaaatattgaatgccttacatggagctgctccttccagaaaatttgttataaccactctaacacatctctctgcatctggccactcatggaaacatgacaatggctttggtatgaagactgtatctttaacacagaatttggttttaagggatcttacctatgccgcgtagatggaattgttctgcccagggagtgtagaagtcttttcttagtgaactgtgaaattggagggcagatattctatccttactcttgctgcctggtgagatggatcaacagcatctgggctttctgatctatgtcaatctcaagttcctattaaacagagagaagagagtgcactggtgggaagggagactgaagactgcagaaatggcctcaaccaaattaataactagtttttcaagcaaattagtttattctctttctttattggcagggtatgtaatgtgctactgtttttgacccgaggccaggtctctctcatgactgatcacaattcttaggagatgcatccactttaaatttaccttttcttgtatttttctcttttaggtagctatagatttcactgcctcaaacggggaccccaggaacagctgttccttgcactacatccacccttaccaacccaatgagtatctgaaagctttggtagctgtgggggagatttgccaagactatgacaggtaagaggcttcaggacatttggagccttatcatctctcatgtgggttcagacggtctttggctgatcctgggcagaaagtggaaattaagtctagtagctccttatgtagtgacttcaaaagtttcattccctctgtactagaaaaactaagtttgtaccttgctcacgctggtcaccaaacaaatcctttctcagccttcttctctcaattgacttgcaagacgattggatagcaattttggtttccattttgtgaagtcttagcctgtgccttgctactcaaaattgcttatgcactagcagcattcttaacctactgaatttgaatctgcatttaacaagatccccagatgatttgtgtatactttagagtcgtagaagcacaggtctattagacattattacatctgatcctcacattaacccttatatagtatgtattccttaaaagaagggaatactgtacaggaggttaagtaatttgtacactatcacgtagccagaggcaggacttgagcccaggtctacccactccacagcttagcctgtaatcactatgcttcactgacctcaaaagctattggtaacttcagcagagggtgtggcacatgtatgtagccaggtgcatgtgtatgtttgcatgtatgtatatagaaaacatgattttaagatcaaatcaatgttctatttattcttacttgatgataaatattggcctttcctaccaagaaaattccctgtaaggagtatcttgcataaattacgttaaactgaatgtattctgcctttccagtagttttagaatgaagtaaaggaatttaggtgcatgcataaggaaagctttttgaaatgaaaccaatgtaaatataaatatgtgtaaatctcagttaactccctggtgtgattgtaaaccaaggctagttagtaatgagcagcaacaaattgacctttcaaaccaggaaaataaagaaagtaactccatcctttaggtttcagaggaattttgtaagacagcatgatttctgttctttctagtgtcataattggtgataatcatactaaaaacctgttatcctccacaccatgggaactgacacattttaaggactagaatgtacagggaaactaataggacagggcaatgggaaaggtgcagtcaatctcctgcctgcctgtgtctctggattcagcttggtcatcaccagtaactcaaatgtagtacaaagccagttggggaatgaatgagcaggtccagtaaaatcaaagagctttaaacactcaggcccttgctgataattcctctcctgtacatccaggaaaaaagtcaatagttattttaaattatctttttggaaaaacacctcttatacttaatcttgaggtattgactatgaagataacttgaatttcaacactgatttcttcaagccccaatgcaggcagtgggtgagggggttcctagagaggtttatatcatatgaagatttccaccagggagagaaaagactggccaattgcatccactacattggaaacttctccaaacgtccccaagacacaaaaacaagaattttcttccttctttataccacacacacagatgcatacacacattagtaatctagtaaaataatgtgtgcacatattgagagacaagaagggggagagtatcttcaggattctcaagttttcaatcttgaaatgcttgcaaaagataaagtaggtaaatgcacttaacacaaatgtcaaacagtagatgcttaattaaaaagttaactctgaatctgcggggaagaaagcagtctcataataaattacaaacagaagactgatgggttttctagaaatgaagatagtaagcctcagagccctcattatagttctgcagcagatttagtggatgatctggaagaagctgctgaacgtctccatttcctgatcgcctcacatgcaaaatgcagagactatagtcagagtggcatgtatatcttgtaaagcttttatccctttgtgagccagacaaagtctggggagcattttttgttccctcaaaaatgcagattcaatataaaaataagatataagatatgaaaccttaagagttacatgaagaatcatcataagtgattgttttaaaatttttaatagagtaagattgaccccaactgaccaagaaaatcaaatttctacagctcagtggagcaattcttttttccatataaagaaagcagctcaacattaaaatgggcaaatacttaaggaagaagaaggaggattgaaaaactccaatgctccttttaaaaagctccctagaagaatgtgtattgcaagctgctcacttgaaaactgacaaggttccgctgtttctcttttgtgtgggtggatagacaatagacaggcagagtcaggaaatttcaagtcggggctctggaattaatttattctcacatcaaagtcagtgtggttggggctcaaaatgaaacacttgaataaaaactgacagaaggcattgttccccctcctgcagtgacacagaggtttctaatccccatgagccttagaaattcctcccagcctctggcagccaagagttttctttttgccttgtacagtcattgctaccaggtcattatgaggtgatccatgaggtagaacagcttgagagatgcataaaactcttttcaggatggccttgaaggaaagcttcccacagacagcttgtcctcaagcctgcctgcctgttctgtccttcagcctctgaaagagatggtgctgctcatttcctctgcctttgaccacccaccccagcacaactacttgtacacacacacaaaaacacacacgcatgtatgtgcgcacacacacacacacacacaggcccacacaagctcaagttgtagcacttctccagctcctgtatcctggtctccctagtctgctcaaagccaaggtgacatcttttccttggggccagtagggatatgggtctctgaaaacctgaaatgttctctaataaaaagcatggtctgtctgctatcaagacagtacagaaactgaatgtgtacatttcctggaaatatggattgccattttatggaagtgtctatcacagaatgagacagatatcagaaaccaaggcagcatttctccatgatgtactagttatggtatgagaagacaaagttagaactgaaacccaatctgacaggtattttcaagtgtagagcagttgcttagtgatgagaagacagttcaaatcacgtgctaccttgtccactctacaccagtcagtggtcctcagccttggctgtacattgaagccattcgaaaagccttaaaatgtgacgatacctgcaccccaccccagaatctctgatttaactctctggtgtgcatcctggaaattagaattctttatcctgctaggtatccagggttgagacccagtgttaaatcatgagagatggctcagatgcaatggctaaggtcctatgcagcatctatttaagccccaaacacctcacgggaagctgtaaagacagaaaaattaatgaagcacaatttttccccaagtagcccacaatctcactgggcagaaacacgtgtaaataaattacagcccagcatggccggggaagtgttgccctgtgtcgggatgggaactgtataaaagagggaagggctaactctgtcctttgtgggaagaggggtggtcaaggagggagtcctggggatgataatttctgggctgatcagaatttggccttcagctttgttgttattagaatgtggatggatttgttctcctttttctgaatcattagaccagacaagccttctatgaggacagaatcaacagggatgatagagagagcatggggaactggtgacagttagacccgggctcaaaccccagctctgctacctctgttgtcataagatttgcattctatgggccttggttttcttcattgtaaattgaagatgtatcgcttcccttgcagagcagttataaggattagatataaagcagctggctaacacaggttctacctttataaatactcaataaatgtcagaggtgattatctttaataccctagatttatgtttcaaaaatgatctgaacacaaagggagacagaactattgtgtcagttctaaagttcactttggaccaatgatctttaaaatgtttttgctcatgtacttttaaaaaaaatattaaaatgtatagctgtcacattttttcactgaaatctgacatttttcatcatgagtttatatagtgataaagaatgaaaattctaatgtgttgtaagtttggacattttataataaaactcttacataactcttgtgactgagtcaagtggaatctaaatgccgtaactatttgatatccaccatcatccattttgtaaaaaatgagcaagctcttcaatgtgagttgagaattgtaattgtttcttccttttcatcgacttatatttccattctcttccctccaaaattttatcctaatgtatcttaataaaattggtttgaaattctgttataatcactgtatatttctgtaataaaattataaatttaaaactttttagtttctaaaaatttctaagatgaaaagattcaaagtattttttaaaatctgagcttttattacaattattactagtgcataattgatcaaaagaacataaatgtactagaaatttcagtgtaatttttgcctataaaaacctatcagaaatcagctcttactgaaacagataatggggtgtttttccaatttgtttatagacctgtggatgagtgctacctattactagaatgggagagtcaagcatcaattctaactcagttttttgctcttatcatcaatgtaaatactaagaaaacctgttcttataaataagtgtatggaaataaataacttgtctagcagtattactcaattctttcaagtttaagttatataccaaaaaaaattacataatggccaatcatcaaaacgttttcttcaatgaactaccagctgacatcagcacctgccaaaatttatttaaagcaaaacttggcaactacctgacttgcaaaaggattttttcccctagtgaatcattcatgtttagaattattcttcttgtatatgatgctacagagttttcacactctggagcaatggactatgatggttaagattcagaataggtaaaagagaaggatacgtgaaagggaaggtatgaatggagaacaggtctctccatcacaggcattcccagaatatcaatttcagcaaaaaacacatatggatgtagaggaactgaatactgatttccctttaaaaaaaaaagccatgtcctcatatccccagaaatgctttgcatttccaggtaccccagttttaagacctctgcttcagagaacagtttttattaaatgtctaggtgccctgagatgccatattgctgtgagcttcatttccttatggatacagtaatttttctttacgtttattaatgttttgatttatctcaaaatcttcaacagaaaggagaaaatggtgattaaaaataaatcttccatctggaggtcatttgacaatagtcattccctaagaaggtcaggacagcttactcattaccattgaagcacgtagggtttttttttattgtattttatactattttattctggttataagaaagattgcctttacccatgtggtaatatacccctcaattttccagattgtctgtctttgtcagtcattttcccagcagttgctaaatggccctttgctgggtgctgagtggatccaatcttgaattcttaaagcgttagtatacagatgctttcttttgtgttcaacttgctttcttttacttcttgcataataagactcttctctgcctagttttattttaaaacagaaataatggatgtttaaatccattgtgcttaggcttaaaactttttctttagtgtgtttattagttagaggctttctggtggctaagttcagagaatttatccctcctggctcattaattattccccttgtaggtgaggcattttccctaccttcctactcttgaaactcgattacatagcagtgcatcatgctcagcaaacattgaatccccaaaagtggcttagaaagtataaaaggaatatcattaacgctagaacaccatagggattagaaatggatggaatgttagagcttacccctcctcaactcatcaaaaaaagaaaataagggtgtggagactcccagtttctctattttgacttctgggtcatcctcgagtgtgaaggaccaggatccatcctccacccagaaaagccttacttcaggcttaactagaaagtaccctaaaatcccccgcacagatctcttctcacacctacccatgcttgttttgtttaaggaggaattgctgaggcaaagtatttcagtatgtccaaggacccagaagtatattttctcctatctatagctaatccttcataagctgttgtgagtctctatttacccacattaataccttatctaatacctgctagatgcaatgcaccacaaagcctggattgacccaacagtgaggagaagtgggagttggtgattttctggagaatttagacttcgatttcaaagaattccagcttccttgtatctcccagcccctaaccccaaatttgatacaattggctatgttttggtaaagttttgtcaaaaccatcattggctagtaatgagctcttaatcagtcaggtggtgataaaggagaatctagctttgctactttgacttttctgtcagcctggggattagtggggctcatccctttttccttatagatgtttaggacagtgagccctaacctgaattgactgaatataccaagaacagtgaaatgtaggaattgttccaaagaacaaatctcagttaatttcttaatgggagaagaaataaaaggtagatgacatgagaaggacacgtccttgccaagagccctatggcgacagccacccgacagcacaactattcgattaaagagggtcttatttgttgtctaggcagggggccagattactggaagtactagcagaaaatcacatttaatactacatataatcattaaattataatggtataacagaaaggtatgggctttggaatcacacaattctccttggtaatcaccataggccacttagcctttctgaggctctatttacctgtaaaatggaaataataagtaggtgaagcttccaggattgtgtgagaatttaataaatagatacatcatctagcagggggctggtacattgtatgcatcaataaatgttaattattctcttccccatcctgtcaactatagtacagtaaagttagagttaagatccaatatatgtgaatgcataattaagagagaaactccagtgtgcataagataactcaaaccaaaggatatgtaagtgattctctcaggttttcacaagaatcctcccttcttttcatagccacattttaataattaaaattcatggattatgtactcattaactactgagcacacattccatgacaagttctataataaatggtggggcagggggcagttgaggcagaagacagtagagatataaagattttaataccaaagacagggtctctttgagttcaaaaaacaagaaaagacatgtaaacaacttatcaccgcttgtatgtgataaggtggtgggcacaatgagtcatgtagagggaaccaagctctgtcaaattagccaaacttacaagctttccactgcttgttttttgcttttgagatagagtcttggtctattacccaggctggagtgcaatggtgcattcttagctcactgcagcctccacctccagggttcaagcaattctcttatgcctcagcctcctgagtagctgggattacaggagtgcaccaccatgcccagctaatttttgtatttttagtagagatggggtttctccatgttggccagactggtcttgaactcctggcctcaagtgatctacccacctcggcctcccaaagttctgggattacaggagtgagccactgcacctggccccattgctttttaatatccatttcgattcagtcttatctgtatttgaactctagctctaattagtggcatgatcttgggcaagtcactttacctctcaaggcatttccccacctgcagaaggggaataactatctctccttgtattttaaaagatgatacatacaaaaggttctaacacagtcaaccattacagttacctagttcatggtcacttttcaaaggaaacaaagttgaaagttgaagtggaggccattgatgaaagggtagggccattttatttcttagtatagaatctagcaaaaaaattaagggaggaagttgtagactaatgactgtaatgaacttaaggggctgtttcttgattttaattatccatgctattgctacccccatcaccacagacaatcaagaagcatgagtcagcactggcatagcaacatggcctagcaacctagtaatgtaggttaatgtttttctttctcattaaatgaataaatgaagcaacttcttgttttttcttttcttcattttggtttcagtgacaaaatgttccctgcctttgggtttggcgccaggatacctccagagtacacggtgagtgagtggagatgtgatcttcttccacttcactgtggtcaaaggataacttggctcttctttgcagcagtctcacactcctgactctgacctaactgtgtcagtagggcctacagagtcagaaattgtcttcagaatcagtgagattaactcgccagggcccgtctcttgatgaaaccctatctcctggtattttggatgggtcttctcagaggtccagatgaagagtttcattgtttagtttcttataaatgtggtcagagtctgagaaaacactcaagaagttgatctccaggggctcagaacctattcactcgtatatcccctaggaaatagaattctattggcaatgccaactgggaaagtccgtgacaatggagtctacagactttcttatcccaagtctccgagtccaagtcttgtatgggagacacagagaagttttgaagaaagaactattatgacttagagaattgggaagctgaaatgttcttctgaagacgttggaatcctatttggttttgataatgatttctcatgacagaaaaaaggcaaagattgtgtgtagataaatttgcactgtaatgaggctgagacactactgtgatattctagatgctcctgtagaacattctccacagagaactcgtgcccactaggtggacagggccttggagagacagcagggtacctctcccagcctccaccttaccagtgcctctgaggtctgagctaagtacaaacaacactgcccaatcctcaatttctcttttactggctgtgtctgagccacaggtgaggaggtagatgctgacatttgctccctcactagagccatcatataaagggctttccccttaggtatcctttttgaaagaggaaatcaatatccctgttgctcctagagtgaatagtggatggaatcgcttgtctccctgacctgttctccttctttcttgccttgtattccacactggcctttctgctgggcatagctacataattctagaagcatttattagaaatacagcttgtggagagaaagaatatagaacaagagttatcaactggtggcctatagacattattcaggccacaaatatgttatatttgacacacttttaaaaaacgaattcagcaattgcatatataaaatgtcagatttctggtttctcttgaaaacctgaaaggcctggcaacactaagattaaaagatgaccgatacaagaataagctggagctgaggagatataggccccttcaaatcgggaatgtaaacaggtgaatgcccactttcttcatagagctgctgaatagctcaatagccatcagcccaactacccagggattcttgagttttcaccacatccccaccaggtggtcttccagcctcaggttggcccaacagggctgaggacagagctatgcaccatacctttttctcactaatgacatctttttggttcccttcctggagtaactaatctttcttgctgttttctgaagtcctcttgttcacttgatcccctaactccatccttcctgtcagcaaaatcccctggttattcttgtttcaataggcatctctcacatttccccatttctggtcccctaatttctcccattcctcagacaagcactgatgatttgagcagctcaggtgcccccaggagagtttacaaggttgccacaatttacttcttaggacaaaatctgaaagtatgcattgaaactgaaacacaagcacctctctttcttagttagcactttctcagaaacagatcttgagacaagggtttggatgcaaatagtttatttaaaaggtgagggaaaccacaatagaggttgggaagtggaagtcagcacagagtatattatcaagtcagttaccgctgttggcaactggtgcttaactctgctgaagaaccctaggagacaatatacagcacacatggaccccaagggataagggagctgggatatgtatacatcacctcctgttaattactgattactcccaagggtcacttttagcctgtcacttgggcaagcaaggcaggccctggaggccaagaaaaaacttaaggtaaacaaagcaaataagatgactgaagtcagctggcttacctggaagtgctaagagcaagggactaggataagcactgagagcatcaccgatcacctcccactaagaaaacaggtgtcttttaacacagtgacctaatttatggatacccaaaagagtcagagcttggaaatatcctttgaaatgaaattctccataaaataccaaatgattcaataaaaatgtccagatgccagaacatctatcttgttttatcaggttttcggaaagaaaaaagtaaacaatatgttatttgaccttgtgcataggttctgccaggtagaggaatttgtgttgaaatattacaaagtatattactttactatgtttccaaaagtagagtgcagtctgttttacctgtaggtatgtgaaaatcctcctgccctgtagttctgcatatcatgttaatgattcttaagtgtcaactgcttagctgaagcttttataaccatcgctatcttcagcagacagcttgggttattgagtttttttgtttttatttttgttttaatcactgggtccaaatagagctcagccaaatctaagcctccagtctgtggccagttctaactagcagctattcaaagtgatctttctgaaatcttttcttggatttttttataagccttattctcccctcctgacagcatttatctgattctagaaaatattcctgtcacctcaactccacagggagcttagaattcaccctccatctcatattgattgtgtaaaggcttgaaatggttcctgctgcttaacacataatgaatataatgggcatttgtttgcaaactctaaaccccagtgccttcttactggattaaagttgtaattcttctttcttcctgttttttaaattttaatcggtgtctaggtctctcatgactttgcaatcaactttaatgaagacaacccagaatgtgcaggtaaagcacaacgtgaaagaaagccagtgtcacagtccttccctttgcagctttcccattttagttcatctctgctggtgtagcatattagttacgattgtccacagaatctctgctttctgtatcaacataaaccatgctactccacaggcaagagaaagccatgataacagagcaggaaaataagaactggaaaagacagaatgcagaagaggtggtcttgagtgtatggcaataatgttgatcccagtctgggattccttgggccataataataataataataataaatgaaacttcacctggtaggcagtgatacaatatccctctttctgttttccaaattttcatcaagtgtttttttttttttttttcacaacttcatctctgtgccgatataaggagaggggggaacatggaaatcatttcccactttcggcatatcggccaaggacatggcctcagcgagtttgaacaagcagcatcatggctttgtgccagagaaagcctgctcaaaggttctggttcatgttccattgtttccagccagaattctctgacatgatttcacaaaataatgatattgaaactatgataataattattataataaattttgttctagaatgattttttctgttttctaacagagccaagtacctatgttgctatgaagatcataagacatttttgcattagaaatgtccatatctctctcttcttgtcaaggaggaaggaggctaaatcaggattaattcagatccagtagagtgtgtaaggcatctagcagttaatggccaagaatatgatatcaataccattgagtctgaacacagtaacctccaagacccaatctccattctgccattttttccactaatgtattcttcatcctcagtttattatggattagactttcctcatccccaaccacccccattctgcaactgtaagagtggtttcccccacagcagaatgaaatataaaccctggtattcacctgttttatactcttagaattcatctgcctgatacttttcaagaggaaatcaaacttgcttatcttaggcaaaagctcaagaaccaaaaaaacataaggagcttctattcagcatcacttaacttcagaaccagactgcaaaatgacttggcatctgtctttagaatgataggctttggggcagggccaagtgggtgcaggattgccaatgaggttgggagcatgtatgtaagggcagaacagaacagaacttgctcatctaaaatacccaagagctattttgcagtgcatggtggttatggagaataatctcaggagggaattgtgtggatccctctggccaaaaacaggactaatgtgctatttcagaatagaaagggatagaaggataagctgaataggggaaggcaagcaataacacaggcacagacaacaagagaagccatttgaataaaaatcatttgtaatgagattattgctgtgggatcagaatgataacatgaaatgtacagtcaagatgtatcaagtactaggagaagctgtatagataggactgcctctcctggcagagtcccatccttttctatttcctgggctcatatggcctcaggatggaagcccccttttaaatgaggggttgtccgtgatgataaccatcacttatctgtactcagtgcccaggagatgagtatatcagccactttgctcattcatcacacacttggtgagcattacatttgctcgatactgcctcaagctctttggggaaatacaaaaaataagtaagtcatgattcctgcccgcagagtataacatctggagagatggtcatgggaactcctgactcttatagagggcacgggtagtatctactagagtcaacaagatcgtgtggaaacaagtgcaacattgaagctagcttgctagtggctaagaacacagtgcttagagccaggcagacccaagtttaaatcctgagtcttgaacacacttgctatgtgacccagggcagatcattgaacatctctaagcctctgtttcttcacctataaaatgggtataacatctatttcattatgctatgaggagcgaatgaaatcttatatataaagtaggatattagggaaaattttgtggaaatcgttgcttttgactttagcttttaaagaggagaatgatttcagtggggaaggagacagcaacactagcaatgtggtattcctttttatcttaagaacataaacatgatgttgataaggactatttgggatatttaatgctttacttttgtgtgtgtttggctataaatatatttggagtgactctggagctgttgatctttgccaatttcacctcaggaattcaaggagttgtggaagcctatcagagctgtcttcctaagctccaactctacggtcccaccaacattgcccccatcatccagaaggttgccaagtcagcgtcagaggaaactaacaccaaggaggcatcggtaaggagggggctatttgcctcctaaggggagcttactcttcctcacctggatattggccgtaagacccatctcactctaacaataaattccaacacttctccctgtgtgaatttggacaaatgacttaacctcctcctatcctcagtcttgacatctgaaacatggggataatcaaacccatctttgctgggttgtgaggctaagagatgacacatgtcaaatgtctaccacattgtctgaacacaggagaaactcaacaatggaagctactatattcactaaagtatgtcatatccacctcctgtccttgaaaagaaaaaagaaaggtttaaaaataagcttgctttttaaggtacccatactacagatggaagcaaagcaccatggaagtaaaacaatggatgattctgcctcctggtggtaaagcgcagcagcacaaaacatcacagcaaaaattggtttcatattctattgcttttcttaagaaaaatgcaaaccaagaccagagtttgagttttgcccctaatattttagaagtaaatatattaccacaataacttctgtatttattttaataacattaatacatgtctttttagctttatgattttttccagatttagtggaatattaccaatgtctgaagtttgctctgtaattttatcctgggtactgagtttttatttaaaaaaatactactcccttatcttcttacatcaattcatctaaccttcttgcactgtcttcatgttctcagccttccttcatgttagaatggatggaggaccatgctcctacctcatgtcaacatcttcttttgtgtacttgagcacatctctgaattatccaggaactttgactctgcagttatattctcgctctttctcctatcatctattgttttcttttctacttccctttgtactgaagactcattcccattaacaagtactcattcaataatatctcctgctttaagttaatatctcccccttgactctgctttgccctttagctactgtccttaactttttcccacttataatctgcactccatgcagaaaccagattgatcttttaaaaatataattagtattgcagcattcctttgttctaaattctctaatacttctcatcatacttggagtaaaatctaaattccctgatatggcttagaagacattataggatctaatctctgcctacctctctgatcttaattcttatcattttctctttcgctccctatatttcagccacactgaccttcttgctgttccacaaacacaccaaatatattcccaccttgaggccttttcacttactgttcccctgccagggtttctctcacccaaacctccatatgatccattctctgactgtgttaacatctcttctcaactctcaacccctctgaaagttccccctggctaccttatctaaaatagccaacccacccacccgcaccatgtctcagctttacttttcttcttagtacccatcatcatctgaaatattttaggtgcatctactaacctgtatattttatgtctctctactttcatatggaagctctacaataagacttgttcactagtatatccctagtacacaaaacaatgcctgcacacagtacatgcttaataaatactacttaaagaacgcatataaagccactctacttttcatatatatatataatgaaaagtactttacattttcttttgtaaaactggtgtgtatcttaaatattgcacatcttgtacgccagaaaatacagtgttcctgttttcattataatttgaagtctctcctacttaaaaagatccaaattcccaaggtccctagagagaacaacagtcactgcatgtctttggttcagtccactggcccttccatacatctcattatcatcttcagctactctgggcttgggtcattgagtgacatgagcaattcctacaagggaataggaagtttgaagcaaaattttgttttagactcataatttttccatgtccttttattaacatagttgaccacagtttcaatctgctacacaacatccatcaggtgacccatagctatccataagaaacaaatgggtctgatctgtggggcatgttctctcatctcctctgttcattacatcatgttcttgaaatcactaaccggtggtttgactatgaaaaggactggagaccctggggagctaagtgtgtgttacttcaaataattactttagaatagtgaatatataaaactgtggatatattagcctttatgctgggcagagacactctgtaagctgagatcttgtccagcagtaatgctgaggatttaatccaagccaagtcttttccaggtgtgaaagctaagaaaatcatgactcctctctgctcatttttcctcttcttttcagaagccatgaacactattaggttttttttttttttttttttttttttttttttttttttttttttttggaaaagggttttggtttttcccccaacctaaagggggggggcacaaaaaggggtcactacagttttaaacctttgggggtgaaaaatttctttggccccaccctcccaaaaagttgggaccaaagggttgggcccccccccccagttaatttttattttttttgaaaagggggggttttgtttttttgcccaggctggtttaaaactccggggctaaaaaaatcctctttttttacccccccaacgttttggggttataggcatgacccaatgcttttggttaaccaccaacacttttaaggattataaaccaacatttcccccagggggggggccctgaaaaggcttccccaaatgcatttttttttgaccacaaagggtttggagcaaatttgacccttcttaaatccaaaatttaggaataagggtgggatgggaccatttttttattttattttttaaccttttttaaacaccaaaaccaatttttaaaatgataacttgcttaaaaactcccatttaaaatagacttaaaaaaacacttttcttgccaaatttggtctaagnnnnnnnnnnnnnnnnnnnnggtcttggtctatcacccaagctgaagtgtagtggcacaatcatggctcactacagctttgaaccttttgggctgaagcattcctctggccccagcctcccaaatagctgggaccaaaggcatgtgccaccacgcccagctaatttttatattttttgtagaggtggggtcttgctatgttgcccaggctggtctcaaactcctgggctcaaacaatcctccttctttagcctcccaacgttctggggttataggcatgagccaatgcatctggctaaccaccaacacttctcaggattatagaccaacatttccaccagtgcgtgggccctgcaaaggcttccccaaatgcatctctttctgaccacagaggtcttggagcaaatttgaaccttcatagatgcaagatttaggaataaggtttggatgtgaccattattttattttattttttaaccttttttcagcaccagaaccaattcttcaaatgataacttgcttagaaactcaacatataaaatagacttaaaaaatacactattcttgccaaatttggtctaaggagtagagtcagaaacttgtccattctctttagctcccttatcctcaagagcatccaaggcatccctaagggctccctggggcccagtttaaaaattggatgatctcatcccctctggggtaccaggactcacatggctaaaaagagaacagaactaacaaaggtctggatttcaggctgatatagaacagcatgagtttttggccatcactcactccctcagggatagctgggtctgcaatgaaaggacaggtcattaaatgggactacaagtaagaagcatccaacccacacatctccatataaattacccctatagaccaagaacataagcttttccccagaggtttctcctgttctttgaaaagtctgtggtccagagtcccttgttatctctaagggtcataaacttgaacatctttggcaagctgtgccagggagtctgttgctataggattttccccttgattttgtggaactcttccaggtaaaaaatgcccctctttatctaaacaggacctcaagtatattcaaagactataatatttcatccatgagcattttcccagtctgactttagaaggaactgttattgtttgctttattggaaatttctatcaggtttcgatcctgcagtctacagcctagtgcctttagctagatgaaacctggcaggatcagattccagaatcctgacaatctcttcagaccaggagttcttaaacttattgttccacaaacccctttagcagctgataaagttcatagatcccttctcagaagtggttttttgtgtttttttgtgtgtgtggttttttgtgttttgttttgtttgagatggagtcttgctctgttgccaggctggagtgcagtggcagctcactgcaacctctgactccctagttcaaatgattctcctgccttagcctcccgagtagctgggattacaggcacgtgccaccacgcccagccaatttttgtatttttagtagagacagggtttcaccatgttggccaagatggtcttgatctcctgacctcatgatccgcccacctaggccttccaaagtgctaggattacaggcgtgagccactgcacccagccagaagtatttttaaatgtacaacataagacccatattataaagtaaaccaattatattgaaatgcagttagcaaaatattttttaaaaggaagatggagacatcataaatacagtaataaaatgcttctgtatttacattttaaattatgagaaccagtagtttgtctaataattctgtaatttctaagttgtgttaaacataaataatacattgaaatatatgtaggtactgtaatataacaggaaaatatgtgtttttttattaataactaagccacaagtagaactaatattaatttgatttgttgattacacttatagtgaaaaaatgataaattttacttagagattagtgaaaataaaaatgtaatttaccccaagtttacagactgccttaaatcttgcagtagtccatggagacaggttaagaacccctagtttagatcagcagtcaataaactataactaaactaaactgtttttcaatggcttgcaagctgagaatggtttttagattttttaattgttgaaaaaatcaaaagtagaataatatttgtattttgtgacatatgaagattttgtgacattaaaaatcagtgtccataaataaaatattattggaacacagcctctcatattcattttaaatattgtctatggctgttttcacactacagtggcagtgttaggtagttgtgacagagaccattatggtctacaaagcctaaaatacttattaatgtcccttgacaaaaaatagtttcctgacctctgctgtagaacattacgactctaaagtttctcaatgtggtagtatgactatcaggttgttttatttcttaaggcatttatcaggtaggggagattcatccactgaactctaagatcagatcagacaggagttaggggaaggtagaggataaaggtaggagacacagaagtgtgattcactcgagggcccacctgctcatgaatcagaagtaatctctttttggatgtgccacctgccctggtcttccaggtgcactctagagagggtgacttatgattctggtatgtcctatactccttccctccatccccaaaccaccaacattgcctctttctgccgcttctctctgcacctccctaccacctccatcacttcatcctactgaaagccttctctaaactctcaagccaacttccttgtgaacatatacaactcagaaaatacagacatagaaggaaacatacaacttgaatgaatctgaaaaccaaactgggaattcagctaggactaggggtgagtggttagttaatggacatggaacagaattagcctttacattagactgtatgaaaagcattcagaacatgtggctatcttcatcacagtgtgaagttcacctacctccagcttacatttttcatttaaaacattttttcaggctcacagaaaaaaaatgaaattctttagtactaccaaactatttgcaacattaagtatatgattctcaaaatcagatgttttcaaaatgtcactcttctatccaatctttctcctttgaagtatggtaacgtggaatggcttaatctcactcttactacctataaatgttaggcatcttgcaggattatattgaaagttcttttctgtttagcctgagctgcatctgactaatctgcttctctttcctcttaccagtaaaggccatcatgatgcctctcatgttgactaaaaataatgatgacctccaatgggtcatccttctccaggccccagagcactttccaaggcttccctgtgctgctgagtacagcacctttcctccaattcccatctctgctgagtcatcttccagctttccagatggaaaggggccaggcaggctgcaggccagaagtcaggacttaaagcaggaagccatgggagcactgcaaccttctgcaagtgtgcctggagaagagctgccacctttgtggcacatggccttcagagggagagactgcaaccctgaccctcttatagcaggactttagactagtgccatccagtggaaatataacacaagttatgtatacagttttaaattcttcagtaactgtattttaaaaagtaaaaagaaacagagaaatccattttaattatatattttatttaaaccaacatagccaacatattgtcattttagcatgtactccatataaaaaaattattaatgaaataatttgcattctattttgtataataagtcttcaaaatccacatgtattttatacttacagcatgtcaatttggatgctaagttatcataaatacttgatctttgtttagattttatagttacagcttaattttaataactacctcactgacagttacaaagaaagaaaaagtagattaatctactgaagttgttccaaacatacttaaaatgtttctaataactgaattggctatccaattttaatgttaaatttaaattcattacaattaaataaaatataaaattcagttcgtcacttgctctagccacatttcaagggctgagtagtctcatggggttagtcatcattgtattggatgtcatagctttagatttttaaatatcttcaagtaaagaagatcatataaattattgggtcccacccctcatttgagaaatgaagaagctcagacacagacgagttaagggatcgtcccagggtctcacagaatgaggctttgaagcctgtcctcctaactcttggcctgctgctctttctttgtaactgtcagtgaggtagttattataattaagctataattgccatgcctacctttaagctccattcatcagaaccctaagcctttaggactatcagcacattcaaaaaatgtctgtcatcactgttgctttggtcaatgtgcagtgaggccacctgggtgtctaactggtattgtattgtccttgtctccctcacctcttcaccccccccatcatcatggggcatctgactgcagcaatacttcatcctgctgatcctgacagatggtgttatcacagacatggccgacacccgggaggccattgtccatgcctcccacctccccatgtcagtcatcatcgtgggagtagggaacgctgacttcagtgacatgcagatgctggacggtgatgatgggattctgaggtcacccaagggagagcctgttcttcgagacatcgtccagttcgtgcccttcaggaacttcaaacacgtatgcatatacacattggggcacttttcatggaagagcagaaccaaagcatgctcacctcccacatttgtccaccaatgtttatggtgatccaccattcttgaagcaacaccagctatgctctacatacccttgctgtgggagatgacctggcttagctatcccttcctgggccacgtcatctcccacaacaaggatatatagagcatgactctttggagaaaaaaattataaattgagttacagatcaggagccatgctaactattgtaggcaaaatttcactgatgcttgccctataattcatataatttaggatctctagtgcatctaggactgcctacagatgggcagcttgttccctgcctaaaggtgcctgcccaaagtaccaagcagaaactgaaatgcagcttatgttttgcttgtcaagctatgtggcctggcagaagtctgtgtttgccttggcaaagtatatttccaaaatgatagaaacctaaatcctctataaaaaatatagtaagcagcatcaaaaatttatttaactccttcaaaacaagatgataaagttagttcaaaagagtatataaggctgggtgcagtggctcacccctgtaatcccagcagtttgggaggccaaggtgggtgtatcgcctgaggtcaggagtttgagaccagcctgaccaacatggtaaaactccatctctactaaaaatacaaaaattagctgggcgtggtggcaggcgcctgtaatcccagctactcgggaggctgaggcaggagaatcacttgaatcagggaggtggaggttgcagtgagccgagatcacaccactgcactccagcctgggtgatgagagtgagagttggtttcaaaaaaagtaaataaataagacagttaaagtcagtgggaaaaaatgctgaataagtttgctaaggtagattgaaaactgattaatgaccaagagggtaaaaaaaaaaaaaaaaagtaatctttgaattgccctctctgtgggccagaaatcgcctgctatcagttttctataaattaatacctaactttacagtcttgggctcttaccagtaagaaatagtaagtcagtcaagcagcattgcattccccaagggccttgaggcagaaccattagacaatgctctagtatgacatagaaaaaatgctcagtaacaattttcccaccttcccaggttttgatacattgtgtccatggaggaaggagcattttttaaatttccacaaatccctgcacctactgagctgtaatcacccagaaggacatcttgaattcataaaagcctcccttggggctaatggtagtcctgaagacccctctagagtatcctagctgtgtctaggcacctgtgggggtaacttgggtattactggatagcctttgtgttttttgttttgtgcttcttgtgaaagccacccaagaggagagcatatgcccagcccctactttccactgaggccttgccctctgcactgctgcagatgccaacaataccatccccagggctggtgactaaacttgagctgccctggcaacagggaatcttcagaaccttcagtaccgtgaagcttatctgtggtctccttggaaaagaagagaatcctctcctttccatgctaccgagtcccctctgtcacctgagtcattaatgcagtgagatgtgtctccacatctcaaagacccctgctggaaagtatcttcattaacttccactgcagtccctccctgcatagggctcaaatcagttatttgggtcaggcaggatgccatcccctccacttcaaccttatttggtaaagcctttctcctccagtcaaaaactcattcaaatgaatccctgacattcttcatactgagtttatcagatatatccagacacatctgactcccaacttgggttcacactggactctcacctatactgtgtaaggaaattgcagatgagaggtggaaagctaaatggatcatcaaaacaatgatccatccatcctcccacccccatacatacttgactgtaatcctggtaccagtcctagtgtgagagcctttagcatatgctcttcagaaattgctgtttgttgtgccactttctttggacaggctttaaaataagaattcagatagatcaccagctcagcagcctcagctgaactctgtatttcatgacctgcccagacttcatagggaagtaactgcacattccaaggctccttggatgatgaggtattgttcataactgtactgccacacaattactactctacttttaaggagggctgcagtgtaattaaaatcactgaaggagcagaaaaccaatccctggctacagagttgatcacagagagagtttctaagtaacagcaacagcagtcaatcttcccacaagctcccagggctgtgcatgtggatgaggggtaattgtgttgttatatgccatcctcaagtttccctaggaagagattttcaaataaaggtactcattaatgaaagagatgcactaagccctaaagttgtctgcctatggacagcaaggagtagagtcaaaaagaagtagtattctttacagacggatgagctagagcaggctaaatttgctgcaattatgttcattaatgaagctagtttctccctaggtgtctaagatggaggaaagggtgttcttcctgattttaatgctgcattcttttcagacagacaaaatagatagacacatcactgaataccagtgataactttgcatagtgcagcaggatcaaagagttcactctctaggagattcattaacttccccaaatcaccctctctcccctctgcatcccccacctccccacttccccacacacacttgtgtgctgacacaatgtcactgaactatgaaaggttctaacctctaccctcaagtctcctcctcttccccaaaacacttacagaatgcttgttctgtgcaaggcacatgctagtcactaggaccacaatgaaatgatagaaccatggatccacacctcaagacatttactggagaattgcatgactgggagaaaggtattagcagaaaaatcacatgctaagcaacctgtgggtggttgagaagaattaaaatgttgttacaggacctcaaagcagagagaggtagccatgggaaaaggcttacagcttaagttaagtgtttgaggaaagacagagccttggagagcagggaattttggggacattgtcaacaagaggaatgctcagggcagagcaaggaagtagggtgctgctcacagtctctgtgctacacagattctctggctgctctgtgaatgaccaaggaagaacaccaggcgcatactcacccatcttatcttcatggatttcaaatcagattttgaaatccatttcattacccaaactaatctactttgaattcaataagccataaataaaagggaaggtagcagcttaaatcattttatgtaagccattaactcatgaattgcctctctttttgtgctgtgcatgataactcagagctttagagcttacagggcacaagttatgttatggtcttttttcctgctcatataacagaatatcatagactggataaagaacagaagtgtatttggctcatggttttggagtctgggaagtccaagagcatagcaccagcacctacaagggtcatctcatggcagaagtatggaaggcacaagcaaacatgtaagacacaaggagaaggaaagcacaaggggcagactctcttttataacaacccactctcatgataactaacctgctcccatgatactgacatcttatgaggccccacttcccaaccctgttgcattgatcattaagttcccagcacattaatttaggagacacactcaaactatcatatgctttaagctttgtgactctgggcaagttatttaacctttccatgccacagactttcatctataaaatgaggtaaatgatacatgcattgcaaagataaggtgttgtctatataaagcttaagatagtgcctggtccatgtaggtggttaataaataaagcttttattactgttattaccagcttcattcatattcttgaccctttcccacccaatacatgtccccaaagccttatttgcttgccagcacagatatgcaaggggatgggggatcctttgggaacaatgctgtccaatatggtagccactaaccacatgtagctacttacgtttaaattcattaagagaaaataaaatttcaaactcagttcctcagtcagacttgccttatttcaaggactcaatagttgcgtgagactaagacctcccatactggacagcacagatatagaatattaccatcatcagaggaagatctatttgacagcctggtttaggaatattttttgctgcaagcaacagtaaatccatcttacagggattacataaatggtttttaaccaagggtaacattatgccccaggaaacattttggaatatctgacatttttgatggtaacaaatatggggcttctattcatatctagtgggtagaggccaaggatgctgctaaacttcctgcagtgcaccggacagtcccccacacaaagaattattcagccccaaatgtcaatagtgtcaagattgagaaaccctggattatacaaatagaacgtatttttctcatgtagctagaagttaggggctcattgctgctggagtcagtgattcaatagtgtcagagccagcacattgtgattccctttgctcttcctacataatgataaaatggttgctatagctccagtaatcacattctatttcaagatagaaaggaagaggaaagggacatagggccaactgtgtccagagcatgttggctgaagtcccaaactaagtcctggactattacaatggcaaagggattaaaccaaaatgttcatcagaaatgtacaagtcttcagggctgggtgcggtggctcacgcctgtaatctcaggactttgagatgctgaggcgggcggatcacctgaggtcaggagttcgagaccagcctggccaatatggtaaaaccccatgtctactaaaaatataaaattagctgggcacggtggtgggcacctgtaatctcaactactctggaggctgaagcaggagaattgcttgaatccgggaagcggaggttacagtgagctgagatcgcaccactgcactccagcctgggtgacagagtgagactccatctcaaaaaaaaaaaaaaaaaacagaaaagaaaaaatgtacaagtcttccagaacactagcaccatgacctccacacacttttacagagttccgaaatactactcctgctaatatttcatatttaatacttttactactcctgtacttaaaaaaatacatacacctttaaaaatagcacattttggtgatttttaattatctgaaattttttttgcatgtgtagccctgagtccagaatctgttaaactcttgtattgttgaagacttttcacaagggaaaagtcttttaacttttaaccaggagagaaaagctttccaaaaaacctcccccaggaaattttcacttatatctcaaaggatggaattgggtcatattgttatccctagatgtaaaggaagctggaaaatcaaggatttgactttctaacctttgtatgagaaacagccagggaggaaagggtataaatgacttttgtatctgccccagtatacacatggaccatggtctaacacacaaccctgagcagttatttataaaataaagggatatctgtagatcacaaatgtccatcatgctatgacatcttcaaaatgtgaaagatcacttgagaaaaactctttacagtgttttcagattgcttaaaagatacatgtctcttattttgagactctgtgagatagagtgaattatttttcttttctcttttgcctctaagaacagcggggcttagtaaagttaaatggccaagtggcaagccacatagaaaagaaaaaactgaaaaccaggtcacatggtattcagtccagccctctttcttttggaatctcaaacacttgttaagtctgcctcaagttttcaatctcttcaataatagttaataatgaggctcaggccattgaaattgcttgcccaggggttgtacagttaatactaaatgccagagccaggagtaaagcccagctctacatgactccagagtccatgtatgatatcagcttcaacctttctctgctacagaatcatcaccataaatcacatggtcctcctgtgcccctaccccaaaatcatgcagtagatccataaggctgatagaataaaggctaaatgaattagtgtggtattcaagactctccatcacctggtctcaagccaattttccaaccaaatgcccaaccaatcctgcaactacccctaaaccccctcgtcccccacctgccatacacacttccttcagctccatcaggtaactcactatgcctatgatggtcaaatgccattcccctaccccttctctatgtattaaaatatgctcagcttaaaagccacctcctcttagaagcctccaagataagttagtctctatgttttttatgccctggcctcactgtttgtgattctctagagaagagcttctcaaattttaatatgcatatgaatcactagagcgtcaagttaaaaggcagattgtgattcagtagctctgagttgggtctgagtctacattgctaataagctcccatgtaatgtgacactgctgctctatagcatgtgtcatattctacctcatagttaatattggccatgcctagttcccctcgtgattacagccttcctgaggcaagaaccatagaccctcaaaccctagtgtggcacctggaacataaataagtgtctaaaattgagtgaaaattagaaataaaactgcagaacaattcattctcccatccaacttttactcgtcttcagatgtaaatagttttatagtttgagacaggcataaaaatatataataatgaaattaaaggtccattttccaacaatctgacaactattgcttgaagtagacccttgacaaataacgaatgaatgaaagtgaatgaaacttagctgcccagagcaggactcaaatcttttaggatgagtctgattccttgaccagaagccaacgtcatgatgatttcttcttccctgcaggcatctccagctgccctggcaaagagcgtgctggctgaagtcccaaaccaagttgtggactattacaatggcaaaggaattaaaccaaaatgttcatcagaaatgtatgaatcttccagaacactagcaccatgaactccccacacagttttacagagttctgaaatactattcctgctaatatttcatatttaatacttctactactcctgtactttaaaaaaccaacaacatatacacatttaaaaatagcacgttttggtgatttttaactatctgacaattttttttgcatgtgtagccctgaggcctggatctgttaagcccttgtattgttaactttttacaaagaaacacagataacaataacttactatttacattacagcatgtcgccttgaaataaaatggtatctgtatccattttttatacaggtttgttgaaattttgctaaatttcttatctttacactctaaagcattttgaaacatttactgaatgttgatagacgaaatatacttggttttatctgctataggatgagagactttttaaaatggcagatgcatggactgtattttgcatgtttaaaataaaaaaagaaaaacccacatggtttttgcagttgttatctctaattcctccctgctgagaatggtctctctactaaagaagaggtttatttacttcttctttctgaggtgagtctttttgaggtaagtctgggtcatctagcccagcacctctcatactttatactgtgtacacaaatcacctgagagtcttattaaaattcagattgtgatacataggtctgtgtgggacccaagattctgcatctttaactaggtcccaggtgatgctaatgcagtccctggactataccaagaggagtgaggatctagactttagggtgtcatgatggagaccatcaaaaacagcgtggcttctagtctgcttgagaatggcacctcttcctgacagtagcacaaaagtcctgcctgtctccagaggtgacagtagaaagtaatgagactgactccagaagctgcacacctcaaatcagtctcgctgctttatactcacacctcttccttagataagactagaaagtgctcctcctggccagtccctgccctcttaaaagtggcatcacacaccactgcatggatggtgtcaatccctagaagtgatctcaaagcgtcttcactggaaccacaacaatagaaacttacacatggcaaatggctatgcagtacagctcccgatatctggtccactaaattgacctttgagcttagtgtgggaatttcttgcctcctttctatcacttctgagaacaaattctataagcagaaatgcctggaattattgtctggggtcgaggtgttttgtttcaatataagctggccagtctggaaccaaaaggacgaatgtttaacttgtataatcttcttgcagggaaacaggcaagtgtttttgcaagcataaaaggcacaaagtggagtttatttttggtcagagagatgaagaagtaaatcacaaggcaaaatttgttgtttgtttgaagaggggagcagtattaacaagcaaataaaatgccttctatgatttccacagttacaattatagatcctaatcttgcaaatacatgtcaccaaatgcacaacattttgggaatgatggtaaaattgtatgactgaaaaaatcataaatatttaagctatattgttttattaataaattgggtacttacagaattcttctaagagttgtggtcttgtttctcttttcaaggcaatttcctaacaataatttatttcatgtaggcaatgtggccttagagtagaagtagctctttcacagtccaatgaaaacatggatcactgcttctaataaacaagaaattaaaatatttaggtgcaatattacagaaatatctggtgattatatctaaccccaaaccaagacatgaacttacatgtctatatacctggaacacagtaaacactcaacagacatttaataaatacagagatgactaataaaataagtaaatgaatgaatagtcttgttaatatgccttatgatcaatctttaatccactgtagatttcacaggtaggttaagtgtttgtgtctatcaattaaatgatgcaccctgtcattcacaaagatctgttaggatctctacactcatgtcaggattcctggagtctgtgagatggggcagagaggacagagtgcagttggcctggcagaaccttaaagcagtttactttccttttcacagtcagactcaagttcatctcaaaagaacaataaaaataatatctatgaattattgaagggtgtcttagtcaggtcaagttgctataacaaaataccataaactgggtagcttaaacaacagaaatttacttctcacagttctgaagtctggaaagtcaaagatcaaagtacaagtcaatttggctcctggtgagagctcacctctggcttgcagacagccactttcttactatgtcctatcatgatagagagagagctagctttctggtctcttcttataagggcactaatctcatcacaaggatcccaccctcatgacctcatctaagcctaattatcttcaaaagtccccacctcttcataccatcacattgaggggtagggcttcatatatgaattttggagggacactaatattcagttcataacaaaaggttactgtgtgccaggcactgttctaagtgcttgtaatgtactatctcatttaatcctcccaacatcctcgtgagatcggtagtattaatagccttactttgcagatgaggaaactgagacacagagagattaggtagcttgccaggattgcacagctatggaagttcagagccaggatttaaatatggatactctggctcctaaacccaaattcattgtataatccccatttcggctatccttcttgcactatactcattcacttgccatatcaagcagcagattattaggaaatttgagagaaattagccttaaaatatcctttgctcccaaattcagaaagatccgtctcatctgatgatctcagattgttgttttgggcacttggtgtctcgtgatgtacaacatccccccctgaaagcaatagaaaattctcaagccacagccaggtctccccaacttcttgccatcaaggagaccatttaggttggacattacaaatacagatgcttccaagagctgtgcaagccataggaataactaagaaaaaaacaggttttaacagagggacataaagagtaaagtaagaagaatggagggaaactggaacgcgtgtgtccagaagaaggcagctgctacccaggtccaggggccatgcaagaatgtggacctaatgcagccagcccaaccagttttttaagaaaactgaaaaacatggtatttcacataaaacctactgatctataaatattgaaagctcatttaaaattcagtaactgtttaaaaagacgacaagagctggttgggtgcggtggttcacacctgtaatcccagcactttgggaggccgaggcaggcggatcacctgaggtcaggaggtcgagaccagcctggccaacatggtgaaaccccatctctactaaaatacaaaagttagccgggtgtggtggtgcatgcctgtaatcccagctccccagggggctgaggcaggagaaccacttgaacctgaggcagaggttgcagtgagccgagatcgcgctactgcactccagcctgggtgacagggcagggcaagactcagtctaaaaaaaaaaattgcaagaaccaatctgtgcaagtcaaatgaaaactacctctgggcttatgtttgctctgtgtgcaaatttggaaccactgagttatatctgtgtatggcctgctctccactgggtctcaacagataatatacacactttaaaattcttgaagaccctaaagaggctttatttctgtggcttatatttattaacatttgctatattaggaattgaaactggaaatggaatatatttattaatttatttaaatagcaataatagacccattacatgataacataaataaaatactttcataacaaactatactttcaaaaccaaaaaatggtcagtgagaagtgcagcattgctttataatttttcaaatctttagtgccttgtttaataaaagattgccagatccttatatctgcttctgtattcaatgtgttgtgaaatgatgttttggttaaagtacaatgttgaaaacctggcctcacgtggatatgtagttggaaagaggagagctatttttagctatttcaggtaattgtccttctttttaccacatccaaactcaacaagtggtagttttttaaaggttagttgcaatgtagaatatgaaatcatatcaataaaattgtcctagcattttcaatggttcttttacccatgcactattttgtagcatcatgtactgggcattcagaaaatattgatccactcagctatttagatgttccaaatgcttgcacagtttattttataatatcaaaaaaccctgcattttctattgctgtacaatatcactgctgatctcaccagacagtctttaagtatggagaacttgtcaaattatggtggcaggttcaggctttccaaaactctaatctttgttaggaagctcaaatgttatcattgccaacaaatactgtcagttgtttttcttgaagtgacaggcttacttcaatcatttttaagaaaatatctcccaagtctgaatagctctggcttatctgtcagtcattttacaagtaaaaatgatgttctatgaggaaaaaaagcagctagatcagctccaaacacaatggcatgtatgcgtttccttgaggcaaccattttaggttaaaatgcagcaaaagcactttctggtgctttacaatttgtctcccagcatttgaaaaacatgaactcacgggtcaaaatttaataaaaataataattttcctactgcaccaggaatagtgttaagtaaaactgtatgttttttcttcaagtgtgtgatgatggtgaaaaatacagggaacactagtaccatgtggtgccactttcttgatgtgagctaaagccccaacagttttactcaccatcgcttttgcaccattgatgccagtgtcaatatagagaaaaaggtgaaaaacattttaatgttattatgaaaatagtttttacctcagagaccccctgaaagagtctcagggacctcactctgagaactgctttttatagcctacttgccaaagttgtatttgtttgctatttctgcataacacatctacaaacttagtgtgtaaaaacaacacacattgataatctcactgtttctataggtcagaaatccaagaagactcaggtgcatcctctgcttaaagtctcataaggctgaaatcaaggtgtcagtagggctgtgttccttactagatgctctggaaagaatctgcttccaagctcactccggttgttggttgcagttgcagaactgaagtccctgttttcttgctggctatcagctgggcaagaaagtagaggggagggcagtgtcagggatggtggggtgggggcagacacaatctttactctgaagggcttctcacattccctctcacgctctccatggggccccctccagcactgatgtgtccttctcaaacattgactctaacttctttttctgctgtatttcactgactccagccaaagaaagttttctgcttttaagggtttatgattagattggcccacccagacaatccaagatcctaagctctgtaaccataattatatcattcaagtcgtaaacccataaacagaacatgtttatgggttccagggactagggcttggacttatttggggggccattctgcctaccacaaaagaagaaatgcaaaatattactagatgattcttagagtaaacgtgggttgttcaagaatcgtaaaaaggcttcccatggtaatagaagaaaaatacagaccaagtcaaggagtggcgttaaaaaatactgctgattctagaccttgcctaggagaggttattctaaatctgcttgaatacctcccgttttttagtctaccccacttgataagcaccaaccttgcactaggcttggggtgagaactagggggatgggagttaaagtgagagaggcagagataaaaatatttggtccctgctcctggaggagctcacagcctagagctgccctctgactctaggactttgggatcccattagacatattatatatgccttaacacttaagacatttactatttgtggactttctcacgaagatgttctcaaacattgaaagtagagcagtggtgtaggaagagaggtaaggacacaggtgagaagaacaatcaagccagtcaaccatgtttatcatcatcccctcccttgccctccacatggaatagataatcaaattcctccttaaaaaacttctactctctaatcctgtcttgactcagtgccttcctcttgagcacggtatgtgaaaatacctggtgttttcaagccaaaacaacatgaattcaaatccaatctctgctatttaagagtgggatggtatctctgagcctcaacttccccatctgtagaagagggagaatgattcctactttgacaaattgctgcgatttcagataatgtatgcaagcaccttagaacaatgtctggaggttgtattccctgaaaagcaaactctaagatcaagattagaatgcagatagactattaagggagtattatcaggatcatgaactgcagaaggaaagaaaaggaagaggcactctgatcccataagaagctttgaaggggcagccctttgaagtgatcccaagctggggaaaaggggcctggcctttataccccatcatagataagccagcagatacctcaaaagaagggttggttttggtcaaagcatctcttctcaactaaggaaatttcagaaaagttgagcctctgggtctcagcaactgaaagaataaattctcaagcctgaatggggagatctgggttgcaaaacacaacatctatgacacctggcatttgccacactactcggtatattgtgacatttgcaattattactgccatcatttttttgttattaatttttaaaatttttatttattttttgagacacagttccactcttgttgcccaggctggagtgcagtggcgcaatctcggctcactacaacctctgcctctcaggttcaagcaattctcttgcctcagcctccttagctgggattacaggcatgcctggctaattttgtatttttagtagagactgggtgtcaccatggtcaggctagtctcaaactcctgacctcaagtgatccacccacctcagcctcccaaagtgctgggattacaggcgtaagccaccacacccggtttttattattatattattttgttgagacacagtctcactctatcgcccaggctggagtgcagtggcgtgatctcagctcactgcaatctctgcctcccaggttcaagcgattctcatgcctcaatctcccgagtagctgggattacaggcacctgccaccgcacccggctaatttatgtatttttttagtggagacggggtttcaccacgttggccaggctggtctcaaactcctgacctcaggtgatccacctgcctcggcctcccaaagtgctgggattacaggtgtgagccaccgcgcccgaccccggctaattattttcaatttttgtagagatggggtcttactatgttgtccaggctggtcttgaactcctggcctcaaacaattctcctgcctcggcctccaaaagtgctgggattacaggcatgaaccacctcgtccggcctctccctgagtaacttcagtcactggtttcacgctcacagtattagcgtacccagtcattgacgccaggcatagcgtccacactcatggctgcagtccgggcatacagcaagggctcaccacagaacgaacgcagtggagctgggagaataccggaggtctgagaggaacctaagcagttcccgcccctcctctatcacatggcagtcgggtaaagtgaggccgggagagagaggcttcagcggctcacccggcccccgtgggcctggatccagggcgtgaggctgtgcgcgtgctctacgctgagtccggcccgggtgtcccccagctcggccacgcgccggctcagctccatggccagggccaggggctcctgggaaggaggcggggacccggggcatgctcggcttgggcgagagctgtcctcccggctacagaacagctccaccaggcgggcgaaaaagccggaggccaggctgatccgcttgctgcggcagggcggggtccgaggccagcagggctaggcggagatttcagttgctcttgctgttccagccgctgggccaccaaggcatagaagtctggagtagctgggccaggctctgaaccatagcaggggcggatgggcagagaccaaggccgaggggactcagagggggctgctcctcgccccagggagcagggaagacatcttcgaaggcggctcaggaagtctgttggctcttcttgggcagggcttctaggtggatttggaacaggagacccagcagcctcaccacgcctaaggaaggcagctaggaccctcagcgtgtcttcccggagccccagctcttcagagcctgccatggaggcacctgatctggggccccactgccacctcctccgctcaacttgccatctcctccactcaactcctactgtcatcatttttacacttctttgtatagccactgctcctgacttattctaaccttatcccctcttgtctagaatgtaaaagattttcctaactggtttctgtaatccatattaccttcatccaatctgctctccatactgctgccacagtggtagttaggaaataaatctaagcatctcattgccctgcctaaaatactttagtggttccccaccaacttcagaatgaaatcctaatttttgaatatgaccttgaacataacatgcatctgactttcatcctgatccttgcacactttttctgcccacttttagccaccccaccccaccctacactgctaacaaactcttcacattggtttgttgtttcccccatcccaccccttcacccagttaatgtctacttatcttgggagactcagctcacatgtcaactcctctcagaagccctcctaggcctggcacggtggctcatgcctgtaatcccagcactttgggaggccaaggtgggcagatcacctgaggtcaggagttagaaaccaacctggccaacatgatgaaaccccgtttctactaaaaatacaaaaattagccaagcatggtagtgcacacctgtaatcctagctactcgggaggctgaggtgggagaatcgcttgaacctgggaggcagaggttgcagtgagccaaaatcgtgccactgcactccaggctgggtgacagagcgagactccgtctcgaaaaaaaaaaaaaagaaaagaaaaaaagccctcctaaacctctcttccctaccctagattaaactaaatatttaccttgtggattccctttttacctgtgcatacctctgtcagaacttttctccccacctagtacctcagtttctcccagagaacagagccctgtcttacctttaaactgagaccctatttagtgcccaatatgtgattagagcatgcagaattaaatctgtaagagaagtcatccttctggtgggaggggaaccacttacagtagaccctcagtgcagttttttaggaaatatagctggcccagcactttgggaggccgaagagatcgaggccaccctggcaacatggtgaaaccccatctctactaaaaatacaaaaattagctggatgtggtggtgggcgcctgtagtcccagctacttgggaggctgaggcaggagaatcacctgaacctgggaggtggaggttgcagtgagccgagagatcacaccactgcactccagcctggcaacagagtgagactccgtctcaaaaaaaaaaaaaaaaaaaaaaagaaagaaatatagctggtaagcacaaatcaaattctggtgcattaactgttattacaccaaaattctcagtttagcaccaagattttgaggcaaacattattaagtacaacaagcttataatacaagaaaatgtgaccagtttcccaaggtttatgcaatgcaattatgtaattcagatgtcccccaagtttctccagccttccaacaaaatatcccgacaggaatgttatcatcctgttggggtattttgttggagctagatagaggtggtggctcacaacattttgaatgtactgtcactaaattttccactttaaaatgactaattttatgttatataggttatgttatgtgaatttcacgtcaacttaaataacacacaataaaatgttgtaataccccagtttattagattagcatgccacccagtcactcacctg

SEQ ID NO: 1648 - DNA, 1965 bp, Homo sapiens
ggttgacaggactgaggtgattcgcacctgcataaacccagtgtactcaaaactgtttactgtggacttttactttgaggaggtgcagcgcctgcggtttgaagtccatgacatcagcagcaaccacaatgggctgaaggaggccgacttccttggtggcatggagtgcacacttggccagattgtttcccagagaaagctgtccaaatccttgctgaagcatgggaacacagcagggaaatcttccatcacggtgattgctgaagaattatctggcaatgacgactatgttgagcttgcattcaatgcacggaaattggatgacaaggatttcttcagtaaatctgacccatttctggaaatttttcgtatgaatgatgatgcaactcagcagctggtgcaccgaactgaggttgtgatgaataacttaagcccagcctggaaatcattcaaagtatctgtaaattctctatgcagcggagacccagaccgccggctaaagtgcatagtatgggactgggactccaatggcaagcatgacttcattggagaattcacctcgacattcaaggagatgagaggagcaatggaagggaaacaggtgcagtgggagtgcatcaatcccaagtacaaagccaagaagaagaattacaagaactcaggcactgtgattctgaatctgtgcaagattcacaagatgcattctttcttggactacatcatgggtggctgccaaatccagtttacagtagctatagatttcactgcctcaaacggggaccccaggaacagctgttccttgcactacatccacccttaccaacccaatgagtatctgaaagctttggtagctgtgggggagatttgccaagactatgacagtgacaaaatgttccctgcctttgggtttggcgccaggatacctccagagtacacggtctctcatgactttgcaatcaactttaatgaagacaacccagaatgtgcaggaattcaaggagttgtggaagcctatcagagctgtcttcctaagctccaactctacggtcccaccaacattgcccccatcatccagaaggttgccaagtcagcgtcagaggaaactaacaccaaggaggcatcgcaatacttcatcctgctgatcctgacagatggtgttatcacagacatggccgacacccgggaggccattgtccatgcctcccacctccccatgtcagtcatcatcgtgggagtagggaacgctgacttcagtgacatgcagatgctggacggtgatgatgggattctgaggtcacccaagggagagcctgttcttcgagacatcgtccagttcgtgcccttcaggaacttcaaacacgcatctccagctgccctggcaaagagcgtgctggctgaagtcccaaaccaagttgtggactattacaatggcaaaggaattaaaccaaaatgttcatcagaaatgtatgaatcttccagaacactagcaccatgaactccccacacagttttacagagttctgaaatactattcctgctaatatttcatatttaatacttctactactcctgtactttaaaaaaccaacaacatatacacatttaaaaatagcacgttttggtgatttttaactatctgacaattttttttgcatgtgtagccctgaggcctggatctgttaagcccttgtattgttaactttttacaaagaaacacagataacaataacttactatttacattacagcatgtcgccttgaaataaaatggtatctgtatccattttttatacaggtttgttgaaattttgctaaatttcttatctttacactctaaagcattttgaaacatttactgaatgttgatagacgaaatatacttggttttatctgctataggatgagagactttttaaaatggcagatgcatggactgtattttgcatgtttaaaataaaaaaagaa

SEQ ID NO: 1649 - protein, 491 aa, Homo sapiens
VDRTEVIRTCINPVYSKLFTVDFYFEEVQRLRFEVHDISSNHNGLKEADFLGGMECTLGQIVSQRKLSKSLLKHGNTAGKSSITVIAEELSGNDDYVELAFNARKLDDKDFFSKSDPFLEIFRMNDDATQQLVHRTEVVMNNLSPAWKSFKVSVNSLCSGDPDRRLKCIVWDWDSNGKHDFIGEFTSTFKEMRGAMEGKQVQWECINPKYKAKKKNYKNSGTVILNLCKIHKMHSFLDYIMGGCQIQFTVAIDFTNGDPRNSCSLHYIHPYQPNEYLKALVAVGEICQDYDSDKMFPAFGFGARIPPEYTVSHDFAINFNEDNPECAGIQGVVEAYQSCLPKLQLYGPTNIAPIIQKVAKSASEETNTKEASQYFILLILTDGVITDMADTREAIVHASHLPMSVIIVGVGNADFSDMQMLDGDDGILRSPKGEPVLRDIVQFVPFRNFKHDAAKSVLAEVPNQVVDYYNGKGIKPKCSSEMYESSRTLAP

SEQ ID NO: 1650 - DNA, 24261 bp, Mus musculus
tacactcccatgttgccctcacgcagcctggctaggctggacctaggacccctttctctatgacacatctggttaccctcagttttctctatgacacatctggttaccctcagtggccagaggtctcagagctgaggccattccagatacccgagactcatcttctccctcccaagtaggaacgagtaaagtaaccctttccccactcttaagccccagagacaccctaggcaactggaaatgagcctttaaggcttggtaagggcattcatagcccctcccaagaggttcttgatctacatctgccctccatgaccctctgagacccactcattcttcccagaagcctctaggtctattattgtctgtccataagcctcttgggaatctttcatctgtcctgagcctagggccttaaacctcccttctcaaaatacttaagaggattccccttatctccccaaggagcctaaaaacttcctcccctttatattctctatatccttagctgtcttctcataaagccatatggcttcctttgtcttttgcaggagcgtctatttttttcttaattattatttatttatttaatatacatgagtacactgtagcagtcttcagacacaccagaagagggcatcagatcccattagagatggttgtatgccaccatgtggttgctgggaaccgaattcaggaccactggaagagcagtcagtgctcttaactgctgagccatctctccagccagcccccttgcaggagcctctagttctgcaaccgccttcccatgatgctctggacccacatgcccttctagtcgcctctgggccttacatctgccttcccatgagtctcagcgactcatgttcacacttaggagccattattcccatgtacatagcacacaccttttcagagatgaggtagaggaggccctaagcatagaaggggtcatgcccacctagaccctaaacagcaaagcacagccagtgctagacttcaaagctacatggttccagaatccatgtccaaaatgagtacaggtgggagggaagagggaagtccgggagacacagagtactcactctggaacattccatggtggcccagagctccctgaccagaactggaaaagctcagtggcctagagaggagacacggatgagggtcagacatcccctgtggccattacagccccatccttccatcccagattctccacagcccccaacccaagccacctgagggccagaagggcccagcttggcctggagggaaggggcggagatgagctgtgccgaagacatggtggccatcgtctggaaggccttgtccttggagacttggtcctgaggaatggttgagattcaggttagtggggagttctaattaagttctaattaagatagccagggtgggatgaagacatggggagccgtgatacagggtcagggaggggtcagctccccacccaaaccttctgtctctgctggcctcctctggaagggcagtgtgtgaggtacagatgtgggaagatgggcagggggactcagcacattcagagtctgacccagggtgggggaaggggccaagggaagaaagaaaacaccttaggaactgcaggttctacttcatctccctgagcaccagatgaccaccctgaggcagcgagagactagggctacccatggaacaggtcacacctcagcctcagagaagaaaggtttgcacgcccacaataagacgcttatggttttctaagtcaagaaaagcctggacacagcgtttcctgatgcccagggaacaggaagggagactttccagatgcccccggggacaggaaggggtgtttttattccagacagaacatagaaaagactgagaaaggaaagaaaagatcagaacctaagggtttcaggcctacaaaaaaggaagggaccatttccaaataaaagaacaggaagtctcattcctgaagctaaaaggaaagcaaccccacagagggccagtgacacgggttcaggcttgagggcacagggactcatggtagagaaaagagagtagatgacaatactttctcataggaaagtgcacagccaagggaggcgaggatggagtgggggacaggaaaagatcagcagggacaggggagggaaggatgggagcagagagagcaacctgtttgctacagcagccacatgacctctgcttgatgagcaggccagcacctgcaggcaggctgcctcccctggggtctctgaccctccagacctttctctctctctgtctggatttccttcactggtgtgtgtgtgtgtgtgtgtgtgtgtgtgtgtgtgtgtgtgtgtgtatttcaccaactctctgtctctgtctggccccacttcccatgtatgtgtctttctctctgggttgtgtaccctcctctatcaaaatctctctctctctctctctctggcctccccatctgtctgagtctgtctgtctgtctctgggtctgtccctctttccccatccctccctctaagcatcccactcagcctcccctgccaacgccctcccacctgcctttaccctcaccttcagcttggactgaatttctctcgatttccttcgagccaaaacctgaatatggctggagacctggagggatgagaagcaggtctgagcatccttcatcaactgccctcccttcccccggaggccgcacacgctgctcttccacaggtcacacagcatgaaatcaaaggctgtctaaagtgtaagcctccaggcccaggcccctctttgtaataaacctacagaaatcagaccgacaagacggctcagcagtaagagcacttagcaccaagcctagttccaaaggtccatccctgagacccacatggtggatggagagcaccaactcctgaatgttgtcttctgatttctacatgtatagtatgtctcaaggacacacacatacacacaccacacacacacaccacataattttctttaaaaagtacttaaaattttttgtgatatattttatgtatgtggattaggtgcatcatggtgcacacacagaggtcagagggaaagttgtgggagctgggtctcctaccatgggggccccagaaactagctgagctaaggtaatcaggcttagcaacaagccctttacccactatgccatttcacgggcacaaaatgtaaacattttaccgaaatatccggcatccccacaacttagagaaaaaccacacaacaaggccagaaagacgatggttcagtcagtgaagcttgccctccctgcatgaggactttagttcttcagtccttgtatactcaatcccggcactaggagacacagataggtgcagactggcacttgctggctacccagtctagtcaaatccgccagttccaggccagtgagagagccagtctcaaagaagtgggcagctgctgagatgaaaccggggtctcccactgacctccgcatgctggcgcatgcacacgcatgtagaggggcctcctacactcacatatacatacgaaccacatcatcagccttgaacctgacccagcccacatgaagatggccctcaggtaatgcccagccccagaccaaagttccaaagtgtcactcctgagacctgctttcgcgttctcgtcttccctgtcctcagcttgatgtaacgggcaatgagttcgttccggcctggaggagtcaaaatggaaaagagtaagactctcagcagaacttcctgccagagaagacagggctgagggataaggtcagcaagccaccaatccccaccaaactacagtcaagccaggctgggggacacctcagccacagggtcagcagctcagccgtgttctagctatgtggccatggacggatcacttagtcttcctgtgcctcagtttccctcatctgtgcaggaaaaaaaaatgctagcgcctaagtcatgggaaggacacaatcctttttcttcgttttgtattttgtttattttcatatctactcatttatttttgtttatttatttttggctttttgggacagggtctctctacatagccctggctgtcctggaactccctctatgtagaccacactggctttgaattcacagatatccacccacctgcctctgccacctgccttatttttattattttgagataaggtcttactaggccaggctagcacagagctcagtatgtagctgagaatggccttgaactgttcaggtgtgtgccaccacagttggccagactctggacacttgggttagtgtgacttttctccctggggtcaggacagccaccacaggggactcaccatacatcttgccctcatctgacaggatgatcttgcgacggccacagggagggtagatggccagggcctcctgaaaactctgctcaatgtcggggctccacacaccttctgcatcagggctgccatcacctccaacgccctcgctgcctccggtgccctcttcgctgccttcctcgctacctgtccagcccccgccatcatccaggggggccccagtccggggatcccccatctgggcctgcagagatgaagatcagcagctacatatggtattgcaagaacaggcaggagcactgcctgagagagaaagccaggcctgaacctgaacccctgggtctgagggaaaaagaggaacctaagcctgggacctgggaggctgttcttccagtgaggaatttgcattgggactgcatggggttgaagccacctgaccaactcaggtgcagtgcctgaggctgtgtttggatttagggaagaccagagtctcgttaattggcaggagtgagactctcctgtcccactaagaaagaacaggtgctcagagaagggcagcagctgctggagaagcagaggctaagtccaaaaccaacacccagagagaaggggacagagagatccagggacaaaaatccagatcgacacagcaaaagggggcatagtcagggcccagaccagaaagtaaccacagaatcaggcgggggcggggctgggtgcccatcaaacttcaggccttgggactcagtcgcccagccatctggaggacagaacaaagagcccaggcatcccctcccccagttccccacaacccctgctgtgggcgaggccagcatgcgagcagcggccccgcccctcccccgggctcggttccagcccaagttcccatcgactttccggaggccaagaacagggaaaactttccccatacagtcagatacctcctccctagaggttttatgttatccagaactcccaggaccccaaagttctgagtcccatccctccaattttggactcttgacctggtagagagaggttaggtgaacaaagatctcaagcccagcccagtgtcgcgacgacgttcaggacccccacaggccgaaatcccaacccagcccacccccatgtggccagacaaagagacagacgagccaggcaagacagacggacatctctaatctcctgacccagtcaccaatcctcggaagaccaatggccgaaggtccaaggggccctatggctctcccttggccactcccgctcctgccctgctccgtgtgggggccacatgcccacagggcggatacttgcacgaaggatggcccaggggtcgaactaacagaagacccgtggtcgctccttcgctcccacatccgcagcccccggccaccccgcgcgctcccccagccgcagaccatccccaggcccctaactccggagaaagttccagctccacacttcggctgcgtcccccgcgcaaactccggccccggggcagaaaagggctccgggcagttcccacgcgatctcaggaacacgcgcctcacctcatcgcgcggaacttcccaccccaactcacaaaccccaagcaggatcccgattcccgccggcgccttcctacctcccggcctgggcaggggagccgcgggcgggcggggcgagacccagagaaagttgccgggagctttgtttgggaaaagtgggagggaccgggggggggggcgggcccggcggtaggcttggaatctcacagggacactcgctgcgaggtgcttgctttaggagagatgagtccatctaaggactgggtagggttgctggggtccctaggagagaaggtggttatgggggcctggattcatgactttagaggaggaggctggggtttgtaactctgggtcttaaagaagaatattgggatctggaccctgggtctgaagaagaaggtactgggagttgaagggagtagactcccagatagaagaggagacatgacctgggtcaccctgggtgtttgctgaggatgtgggattgacagatacaaaataatctttaccaaacttatgtgggttttttaaaaaagattttatttattttcttaatgtgagtacattgtagctgtacagatggttgtgagccttcatgtggttgttgggaattgtttttaggactgctgctcactccggtctgctctgttcggccccactcactcagtccctgcttgcttcaccccaaagatttctttattattacacataagtacactgtagctgacttaagacacactagaagagggcgtcagatctcattacaggtggttgtgagccaccatgtggttgctgggatttgaactcaggaccttctgaagagcagtcagtgctattacctgctgagccagcccattttgtgtttttattttactctgttttttaacgtttacattttatctgtatgttttgtctgcatgtatacctacagaggccagaagagggcactgggcactggatcccctggaactggagttacagatggttgtggtcaaccatgtgggtgctgtaagtcaaatccaggtcctctggaagagcaggcagtgctctcaatccctgagccatctccagccatgtatacttgtgtgtgtatagaagtgtgggtgtggggcgtggtagcacatgcctttaatcccagcacttgggaggcagaggcaggaggatttctgagttcgaggccagcctggtctacagagtgagttccaggacagccagggctacacagagaaaccctgtctcgaaaaaccaaaaaaaaaaaaaaaaaaaaaaaaaagaagaagaagtgtgggtgtgggtgtgtaaaagtggagatgaaggtcagaacccgggacctcacaagggctaggcagaagttccagctcagagctgtatctggtccaaccagtttctgtgtgataagtaaagtgctggggtgggttggtttgcttctgatgagaacacagcttccttgtgacctggccagagtgaagcctgttgggctggaccccctgcgtttctgaagatccacagaagtgcagactccacaactgcttaggcactagtggctgcaagtggctcctatcccacttagaggcagagcctggctgcctgagggcagagagttggaacccagggttttgttctcttcaaactgaaggtctgggtaagagtgatatcactgagttacagtcccagctcctgtggagttgaagctagccagggtgttctagtttgttttctattactgtgataaacaccatgaccaaaagttggggaggaaagggttaatttaagattgccattgtgatccatcaccaaatcaccaggaaaggaacctggaggcgaggcaggagctgaagcagagaccttggagaagccctcctcaccggctcgctcagccttatagcgcctaggaacactggcccaggggcgaaaccacccacagtcagctggcccctccaacagcaatcattaaatctctgccctcaggcacccaggctctgtttatcctgggacaggggccatttctgtggaccttcagaaacactgggagtccaggtcaataggcttcctgctggccaggtcacaaggccctgcagacttgcctataggccaatctgatagggatattttttcaactgaagttccctcttcccagatgactctggctcttgtcaagttgacaataaaaaaaaaaacaaaaaaccaaaaccaccaccaacaacaaaaactaaccagcacactgaaatacaaacatcctttgagaaaacagacaaaatccccccagccagccagccaggtaatggtggcataggccttaatctcagcactcaggaagcagaggcaggtggaccgttgactctgaggctcctggtctacagagtgagttccgggacagccagggctacacggagaaaccctgtctcaaaaaaagaaaaagaaaggaagcaagcaagcaagaaaatggctatgagctggacagatggctcaaggaaaagaacttactgccaaccctgacaacttgaattcaatgtccagatctctctctctctctctctctctctctctctctctctctctcacacacacacacacacacacacacacaggtcacactgctcagcatagttcaaggccagtctgggatgcataagaccctatttctaaatttaaaaagcaaaaatatgagaaaaagaggaaaaagaagcgctggctgtcttcaaactcaaagccaagagtcgctggcatatgggctctgtgagtctgaaagggaagcttagacttgggatttcttgggaaatataacacagggctgtaattaggggttttttggaggtagctgggttttttaaatgaaatcatccggaaaacgagaaacatctacagtaatgctcggagagtcaataaatgagggtaaaccagatggcggagtgctgaaggcacttgcagccaagcttgagttcgatccaggggacctacacggtggcaggtaagcagcaactcctgacagttgttcactaccaggcatggtggcgcacgcctttaatcccagcacttgagaggcagaggcaggtggatttctgggttcaaggccagcctggtctacagagtgagttccaggacagccagggctacacagagaaaccctgtatcaaaaaaccaaaaaaaaaaaaaaaaaaaaaaaaaggttgttcactgacctccacatctgcgccatggcagttctgtgtgccaacactccgaataaataaaattaaatgaatgatcttagacccagatatgggtgaacagggatccaaggagttctggaatacagaggcgtgacctgggtggagcattgctctagtttaaagggcgtggccatctgtgatggatggttgactcccttgggagagttaggatcagagaacagtagacagagaacaatagggttccggagctgaggccaatgataagtccaggtaatagaggctggaggataagatcatcaagtggaagcgtggttatagaataggagcgtaatcaggagaggacctagtggtcagacttaagggaagtaggtagtgaagaatggaggtcatgaagaagcatgcgcacgggaggaatgtttatccctgggcacatcaactccgggcaaaggcagggagacaggtggctgtggcttaaagcacaagcttgtgccttccagagagatccggggagaatttaggtaggtcagtgggcggaggcgtggtcaggaaaaagagggcgtgtccctttgatgagtcatagccaaagaggaaaatctttcttaaaagacgttgttgccgaaaagaagggtggctctcaggcaccaggtaaaataaatgcctgttttatgagtaaggtcaccaggtgtagacgtggccatccacgaggagtatggcttaagaggtgtggtcagtcaacaatacagatgtggatatgccagagacccgatggtggagtagtgaggatcctaggcgaccgtgtgtggagggcgtggtgagacaattagggcgtggccagtctcgcggagccctgacacccaacgaacgctccagtaatttgcccaggctcgagaccagaactggatattaactgtccgtatccggcggtgtccggagccgggtgaccgggtgtccagcagaaggcgcgaatgaaggcaaaggtaaggtactggatctgagtgaggctaaacccggataaggggcgcctgaaatggagagaacgcctacagaatccagggggatgcagggcaggtgggcggggcggagcgggtccctcacctagggtcggagcctggaaagagccgacaaggggtgattgtgggatctgaaactgcccttgtcacagcctcccacccacctgcaatgtgtcgactgagggtcttgctgctgctgctccccttggccttcgtgtcctcctctgctctccccatccatgatgtcgactctcagcagaacacctccgggttcctgggccttcagaggcttctccaaagctttagtcgactgttcctaaaagtgagtgatgggacagagacatgaaccaggcagaaggcagataagaaaaggagcaaacagaacagagagagttggagataagtcttagatgggcgagtggttgtctagcatgtacgaagccctgggcctgacgtcctgcaacaattacaccagcactcaggaggtgcaggccggaggaacaggagtgggaagccaccttcccctacacaggaagtttgaggtcagccaggaatacgcgagattttgtgtcgcagaaaagcaggtgttgggttgaacagatagttgggggacatgacaacacaaaataggaagagaagccggacctgtgattgaaagcctgtcatcccagctagcaggtcccagatgtggctaaggctcccatgaaatcccaacatgagaaagaaaaaaaaaaaaaaaagaaagaaaagaaaaacaagttcaaggtcagcctaggcagctttcatcaaaccctgttggaaaacataaaaagaggcaggcctggcaacccatgcacttgggaggtaagagacagggcaatgtctggatttgaggccagcttgccctgcatatcgagttccgggtcagccagagctacatacatagtaagacccagtcagaataaatcaataaaaagaggggttatagtggctgagggtgtgactcagaggtagagcccccaagccgggaggctgagggtgtggttagagggtacggggcttacctagcatgtgtgggtgagagggagagagaaggggaaggagaggtggacgccaggacaggtgaggaacaggagcagcaaagcaatgggacaaaaagatggatggggtttagtggctagaggctctggggatcggtggaccgaatgggactgatttggagggcaccctggaaggacagcgggtgtgcacaccatttccctctggccctagaatgacctgctacgagacctggacaacttcttctcctcccccatggacttccgagaccttcctaggaacttccatcaggaagagaaccaggagcacagaatgggcaaccataccctctccagccacctacagatagacaaggtgcctccctccgcagggcagcccttcctgcgctctccccaccacccatcaggctgctttccctgacaggaggggcaggtgagggaggaaagcaggtttgttctgactctcttgtgcaaccctcacaggtgactgacaaccagacaggggaggtgctcatctcggagaaagtcgaggcctccattgagccagaacggaacccggaaggggactggaaggtaaggaccttccttgccccgaggtgtccaggaatcagcatttttctatagccattcaccctgtgccatactgttccagtttcctctctgctgctgtaatgaagtattttagcccaaaacatacaaggaaggaaagggtttatctggtttgcatcccatcacttagggaaactcatggcatcgtttctactctcaagagcaaacagagagaaaacatatttgcttgctttctcctgtcttaggtggttcaggatccattacttaggaaatggttccacccacaatgggctgggtcgtcctacatcataaccatcttgatctagttaataccccattcagactctcttctctgctgattctaagctgtgacaagattggcatttaagattagccagtatacactccatacatggaatatccttgagatttctggagctcagtgtaacgtgtcaaaagggagaggacaataggcatggttaaacaaacacagatgatccagtacttgaaaagctgagacaggagggttgccacgactttaggcaaaaggcagaaaggatctctgtgagttgaagaccagcctggtttacaaagcaagtcccagcccagtgggggctacatatcaggaccctgtgtcaaagcaaatataaatgtcagaaagcgttttggtcgttccagaaagttttaggctttcccaacagctttataaatcttagcattcaaaaactccaccaatcccagaaatctggcaggccagtaagcccccaggatcctccagcctggacctcgtgagtgtagccattacaagcatgacctgcagctccctgtcactctgtgaatgctggagtccagactcaagctctcagatttgggcacaagtaccttttgacagtcccctttctgagacagggtctcactatgtagccttgactagctctgaattgtcaatgtccctgcctcaacctacaggtagctgggaaaacatgcctgaaccatcaggcccaactgaaatcagggtaatttcagaacaggaatttggcataggcaaccaggaatggtgacacaccaggaatggtgacacaccaggaatggtgacacaccaggttttttgtttggctttactttggtttgggtggtttggtttaggttttggttttggttgttagagatgggatcactctctgtagccctggctatcctagaacttgctttgtagtccaggctgtcctccaactctaagatctgcctgcccctgcctcctaagtgagtttaaaggcctgcagtaccattcctggcaaaacttaaggcttttgactcagggtgatccaatacttggccacctcccaaatgcggggattctaaatgtgaaccatcgcaccaaatttatcatttgtttttgtttaatttttgttttgttttgttttgtttttttccaagatagtttttctatgtaaccctggctaccctcaaactcacagagaccctcctgcctctgcctcttgagtgtgggggagtaaaggcgtgcgtgcaccaccactgtccagcgaatgcttgctttcttgcttgctttctttctttctttcaaaaaaaaattttttttaatttttaaaaattgttagcacatgagtgcaggtacacacaatggccagaagagggcatcagattccccgagagctggacttaatggagcctgtgagatacttaccatggggtgttaggaatccaaagaatatcttctgcagagacactaataatgcatgtaaatggtgcacacactcaacgctcaggcacaccaggtaaacatagatgaaataatctcttaggcaaccgtggaagtttaaaaataatcaaattttggtgctggaaagatggctcagcagttaagagcactgactgctcttccaaaggatccaggttcaattcccagcatcaaagtggcagctcacaactgtctctacctccagttccagggatctggcaccccctcacagacacacatgcaggcaaaacacccatgcacatgaaaataaacaaatcttaaataataaatttaatacacaagaatgcagcaggccagacagaaaacagaactgtctgcctaaaaagggttttttaagcagcaagtgagctgtaatggaggttgagatggcccagtggagaccaaacatcttggatgcgctgtgcggcatctgaggagctccccgtgcctcattcccaggttcccaaagtagaagcaaaagagcccccggtgcctgtgcagaaggtcaccgacagcttgcacccagagccccggcaggtggctttctggatcatgaagatgccaaggcggaggacccagcccgatgtccaggatggaggccgctggctcatagaaaagcgacatcgcatgcaggccatccgggatgggctccgtggaggcgcccgtgaggacagcctggaggatggggtccatatcccccaacacgccaagctgcctgtcagaaagacacactttctctacatcctcaggccatcccaacagctgtaagtggggaccagatgtcccacaccctaccccaacaccatatggaaataaaggttttcttacatctagctcaatctccttttggtatctcttcccaaacaggccagaataacgactccatcctacacatacactcagtgctgacaatggctgtgccagctcttccttacatctcattcagaacatggcctcttggttgggcagctggatctcctgtagcaccatgatacacctggttccgaaaccattgatccaccctgtctgccatcccaagtctttaaagcacattgctgagccaccccagccaccaaaatatatattttttagattttacaaaattactcaagatctcacaaaagggaaagcaaatattgaaaaattaatattatgggggctggagagatggcttagcagttaagagcactggctgcccttccagaggtcctgagttcaattcccagaaaccacatggtagctcaccaccatctgtaatggtatctaatgccctcttctggtgtgtctgaagatagcaacaaggtattcatagacataaaataattcttttttaaaaagttattattttaaatttatatgtataaaaattttgttggcatgtgtgtctgtgcaccatatttgtgcctggagaccagaaaagggaatcagatctgctgggggtggagttatagaccctgtgagctgccacatgcgtggggcataaaaccatgccaggaaattcagttaggcatagcaagttcagacccagagactctgtgcacacctgaggcttaggcgactccctgctcccccaccccacccacagactcctgacttggaacacatgccatgcttcgcacataaatgtgtcaagctgggcatggtggcgcatgccattaatcccagcactcgggaggcaaaggcaggcggatttctgagtttgaggtatgattttacacatccattttccgccatgacaataaactgtttagaatcatagactgtctcttttcatcaagatctgctgtgggagccatgaagaaggccttcaccttcagagccacaacccactcccccatagaaggcttctctgcgctcccagtcacaacctccttcccttaccaagataaggacaataatccctgtgagactagctggagttccccttctcccccaacccctgccccaggctccaggctagatgctgtccccagacctcaggcccctgctcttccaggactcccagccgtgccaggatttccaagagtctgagaaccccacaaccctggccttgtcacaggcctgggaccccagaaggagctctggctttcccaccctgggagcaatgtcacttccttacagcccagcatccaccccagaggcagtatgggataagcccagtcaaactccctgcttctgtgtcctgagtggcctgcaatgtggatgctgggaatccatctcaggtgttctggaaaaacatccattgctcttaaacagtggtctatgtttccagccccaggaatggatgttgataatagggacaaagctaacagggtccagaatgcaccacaagttgtcctgaaaacacccggcagacctttcatctagaccaggcgtcctagtttgctttctactgctgcggtgcgtgagcaccacgatcaaaaacaacttggggtgagcaccatgatcaaaaacaacttggggagtctatttcatcttgtgatagatcacagtccatcacagagaagaggcagggtaggggctcgaaggaggaactgaagcttgctcagggttttgttttgttttttttcatacaacccagaagcaccttcccaggggtggtcttgcccacagtgggctgccatccacatcactcattaaccaagaaaatatccccacaggcttgcctactgacagggtaacttttcagttgaggttttcagatgactctggcttttgtcaaggcaacaaaaaactaaacagcacacacagggtctgatggtcagtaaggtgagaaagaccttgcactttttgcctctacctcccgagtactggtacactaccctgcccaattcactaggccctagggattgaatgagggcaccctcagtcaaacaccgtacccctgagctacatgcccagtccttatcattacatgcatgtgtttttaaacagcaaggggtaggaaagtgaacatgatagggtctgcatgtggaattcaggggccctccttgcaccatgtgggtcctggggattcttctcagatcgatcaccgggatgggtggcaagtgtctttactcttttttggtttggtttttttttttttttttttttggctttttcgagacagggtttctctgtgtagccctggctgacctggcactcactttgtagaccaggctggcctcgaactcagaaatctgcctgcctctgcctcccaagtgctgggattaaaggcgtgcaccaccacgcccggctgttggacccttaataataaaaaagttcgaatagtccacaggcatggactgaggcagggtgattgcttcaagtccgaagccatcctgggctacatagctaagcagtaagtagaaactataatagtttgggaaaacagcttgggtacctattaatgcggggggcgggggggggggagggaatggagcggaagtgaggctggaccagactgcgcatcattgtgacagtggcgggcgagccagacccaaaagaaagaacttggttcaaagactgacaagaagaaaaggatgaacagggagtccttcggttgaactctctcctgcttggccctattttgtcaagcagaaggaaaggatttttgtaccgcagaagaaagctgccgataatatcgcgccatcaccgctagccccactagtgcgcatgcactcgatcctcaggtccagcctatcctcccgagaagctctacgcatgcgccagctcaagggtcttcgtaaggagagacccgggcgccatccactcggagtgcgcttgcgtgagtacaagagcctgagagggcgggacttgcaggaggccggctcatttgcatttctggcgggaaaaggcgcgtgtgaacacgcctcttccgtgacattcgcaaccgccgttcgtcgctggtgtccctcaactgagtcccgactccaggtacgccctgcctgtggcgactttcatggcaggttccccggtaacatcacctgccagctccttcaaaaacgccccaagttttgagacaaggtttctctgtgtagccctggctgacctggaactcactctgtagaccaggctggcctcgaactccgaaatcctcctgcctctgcctcccgagcgctgggattaaaggcgtgcgccaccgtgaccggcttcctcaggaaaattctagtggcaacttcggcaatcctgtcagactcttgaaacttccggttgctttttgttgcttgttttctatttttgtttgagacagaccctccaagtgctgcccaggctggccacgacctcatgatcctcattccccagttttaggattacagctctcccagatgtgcccaactgcaatcttctagaacttttgaaacctaacacttaatctattttgtttttgtgggtagggtaggtgtttttgttttgagacagggtttctttgtgtagcattgactgtcctggaactctctctgtagaccaggctggcctgtgtgcttctggttcccacgtgctgggattaaaggtgtgcaccaccactgcctggcttttgtttgggtgtttttggtttttgttgttgttggggttttttgtttgtttgtttgtttttgagtattttgccggcatgtttgtatgtgtgtcaggtatgtgcctgtggagaccaggtggttttgtatccctctgaactaaaattgcagatgaggaggagttcacatgtgtgtagtgggattccaacccatatctatctggaagagtaaactgttagtcctcttaacgactaagctaccctccagggactctctagggcttcagtaaattgcccagactctactcaaaaccttggatcctgctgcctcagcctcctgagtgctggtatcacaggtgtagcccaccacgccagccgctaggatcttctagatatcccatcagagtctccctcaaaaacctgtcagagacttttcctctgaaatcttggtggagatttggtgttcaagtcctatctgatactttagaaatctgtagttgccctacaagttccgccggggactctgaaatctagtgacaccccagaaatgcagcccttgaattctagtccagggatcccctccagacttcctccatgtttaaaacccacaagacactcactggccacctgatatcccttgttcctcaagattttgtccgagtttccccttgaaagagtctcagaaagcctcttctttccctggtgccttctaaaagcctctgagatggacagcaggaggatccccactagctgaagaccagcctgctttacacagcttcagaaggcccactacagctaaagctacataatatatatttactaagtccctgtctccaaaagccagataataatgtctccagaaaacattcggctgccggaatacaggcaaggcagagtgatggctgcattccctgaggaaagggagagaggctgcttctctccccttcggtgacaaagatataggctggatcactccagattcaaaatagattaaggcgggcttacgaggaggcatcaacctccacccacctcacacgtggagatcagtgaagtcacacatccaggctaagcttagcaaaggtgttttataaagcttagacggggagtgataacgtgccagctaggggctgggattatgtccttacatggtcaaaagctgagaccccgggggcggggggggggggggttggcacttatgggtggatagctggaaagtggagaggagaggtgttagccccaagttttgtccttgtgggcagagttgaggggagaagagcaaaggaggtttcttagcttttgcaggggatgagcaggggttccaaacaaacaaaggggagccaagcaggaggaaacccaggctctctctacccttggccccagtccctagagggactactgacagtgcctccttttctcctgaaagtgactggccagtcgggcgtggtggccagcactagggaggcagaggcaggcagattggatttctgagttcgaggccagcctggtctacaaagtgagttccaggacagccagggctatacagagaaaccctgtctcagggaagaaaaaaaaaagtgactggccaggctgtaatagaggcaggacagcactgtcagggtgcagaggagggagtccctgtgaccacagaagcctgtgagagtcaagcccactcataaatataggccttgggagtgtctgtaaagatgtctcagtggtaaagagcactgagttcaattcccagcaaccacatggtggctcacaaccatctgtaatgggatctgatgccttcttctgtcatgcaggcatgcatgcaaatagagcactcatataaataaataaacaaacaaacaaataaataaattttatttttaaaaagggggagcagcatggagatggctggtggaggagaaaaacaacagagttgattttcaacagagaagagcctagagagaaggcccggtggttaagagaacttgctgtgtgtcagcgtgagggcacatgcctttagtcccagcaccctgaagcaggtggatctcttgagttcaaggctggtattcctggcaagtgttaggccagccagatctccagagagagactctttgtttggaaaagaaaagaataagaagccactgagacacttactacttttgcaaatgaccaagttttgattctcagatggcacatgccagctcacaaccttctctctccagttccaggtgctctgatgccctcttctgacctccaccacatcacaaaacacatttaaaaaaaaaaaaaaaaaagggtgagaagcaggcctggtgatggccatgcacattctttttttgtttgtttgttttgttttttggggttgttttgttttgttttgttttgttttgttttttcgagacagggtttctctgtgtagccctggctgtcctggaactcactctgtagaccaggctggcctcgaactcagaaatccgcctgcctctgcctcctgagtgctgggattaaaggcgtgcactaccaccgcccggcggccatgcacattcttgccaaggcaaagagatcacaaattcaaggccagcctggccatcttagggtggctttgtttccaaatacaaagagagccagagtgtgtagcttaacagtagaacacaggtattaatcattagtaagcagctgccctgggatttgatagtagagcacttgcctagaatctaccagtgaaagattgaaggtgactcagtgataaaagtgactggaagtagggaagagcactaggaggccagcagtctacagaggaccccatggtctgcctacaggcagggagggagcctgctgggctgtagtcagctccagatagagtgaaatgttccagagaacaagaggcaggaaggcaagagtcccaagcagagacatagtaggagcagcaggccactttaccaaatggcatgcaggttagatgactgctagacgatatagcatgatttggggagagaaagctgctggcccaggccacactgtgcctctgttgctagacccaagcaggctcggactcaaagaagccacagccacacaggtcaaatctgcagcctgtgggaatggactggaacctggcaggaagctaggacatgggccacagagaacaaggtgagcccgaggtcggactgtgaagagacccagaagagagcaagatggaatctctaggacaggaatggtgacttgttgggttatggggaagagaggtggcctcaagccctaggggcaacagttgaccccaccctcttgcctccccctttgatcttgctgctgcctgctctcttcagtcctcaggttgccatcccacacctcaaagccataaaaacaggttggagttgggatggggatggcaaacaggttctgagaaccctgagggcctcgggcagtgatggagcagtttagtcagccgagagtgtggccagtctgaggaagccatcactctgcttgtccttgtaggagctatctggacatcctttcttttccccaaccctcctcacagtggagggaagctgagagcttcgacagcagctgtagaggagcatcaggagtggtccatggacctgccggagggccaggctggtggtccaactgcacagagtaagtatctgcctgcaggaggaagagggagctgcgggtcaggctgggagcaggagagatgctagggtgggcagaggcaaaggatgctaggataagtgtcaattgtgtgcctgtcacatgtctgccctatctcctctctggagggctattgaggacagaaggctccacacactataacacccacacttcgcacctcttactttgggtaaaacaggtaccctgtcacctctatccctcctactgcacttgccttcccaacactggtgtctgtctagcacctgcttagtctaagactctccccggagcatggctgtacagaccctgctccactcgtgtgtgtgtgtgtgtgtgtgtgtgtgtgtgtgtgtgtgtgtttgtgtgtgtgtgtgcgcgcacgcacgcacccacacagtgcagaagagcagaagatggaatccaaggttttatgtgtgctaggcaaccagtcacttctgagttgtgatcccatctcccagtgttgtttttgttttatgagacaggatctggatttgaactctcactgatcctagctcagcctctcaagtgctgagatgacattcgtgtaccaccatgctcagctctcatatttaatttttaattttttaaaagagaaaagctgggtggcggtggtggtacgcacctttaatcccagcactcaaggaggcagaggcaggcagatctctgggtttgaggccaggctggtctataaagcctggtctataattctaggacagccagggctacatagagaaaccctatcttgagagagagagagaaagaatgcatagctggcagaggggtcacacctatagaactgaagggtctgagaaaataagaaagttggaggccaagtcaagcaggtggtgtaaatggtatgttaactgattttatgtaacttggttcatataccgactgtttgctgtgttaagcctcatggaaacatgccaagttattcctgtgttcacagacatccttgagaactaggatgtgccttacactaacagaacgctccgttccagcttggcctgcttacgtgcaggagaagaagcacgtgcagtgggcctctgcacactggtgctgctgccccagatcaatgcctgttttgctgtgggcagatgcagacaagtgggcgtgggagccagcgcgcatcagctttcggaggaaggtgctggctcactgactcctgtgggccagcctctatctctatgtccctaactcctgttttcttccccgccgatctgtctctgccctatctcagcaactcttttccccaagaatcaccctcctggtttctctgtctccatctcctgaggctgtgctaacagggaggccagcctgatggggtaggaagctccagcgtctatataggcagttccgactaatgcaggaacacctgtcttttaggctcctgggagtcgacaagtacgcctgcagctttgctcaaggctgagatctgcaccccaacctcaggggtagcctctgcaaataggaggggtttacaggcaagacaccagcatgctaataaggctggctagcttgggagatgactggcatctaaaccttgcctgcaccagcagagggcgagcagccaccaggaattaggaccatggccaggtcagcttctgagattgcagactgaaaaggaagaacacacccacaggggaaagccgaggctgaaagacagggatggcaaagaagagagaaggcgcttgggacagagtatcaagattaagatagagtacagggtggggggagaaaagggactgaaggacacaggacagaggctgaacatgtgagagaggttggggaaaaatgagaacaatggtccagaaagagcagggtggtggtcatgcacgcctttaaccacagcacatagaggcagaggcaggtgaatctctaaattcaaggccagcctggtctacggggtgagttccaggacagccaggatgccaggactacacggagaaaccctgtcttgaaaatccccccccccaaaaaaaaaaaaaaaaaggagagagagaaagggggggggggacggaacagtgtcttccttcaggacctcaggaagggactatgcaccattggcctttctgggccacagcacagagtcctcctctgtaacacgggacggtggagagcagtaggccagctgaagtcttctacctccccaaactaacctgccctactgccctcccatgggagccagaagagtccaggtcaaactggggtacagcatcctggaagtgtcagggtgagagaagagactctgtgctggaaggtgcctgtgaccgcttgtgctgcccgtctgcctcagactcctcgtgtagggataggagctgctgcggtgctgacgctccatgagtgcctgtagttacagaccacgcagaggcccacccacatgcatccatttcttccccaaaagggaggggggctttctcagaggatactgctgacactcagagggggtggggggcaggacaggggtctctagtgccagctcagactctaaccctgcagccatgtgcaatgggcactcatctcagcaggccaggctgtcagaggtatgaaagccacctccagcttggagaagctctgtttattgagtgcctgctgtattcatgtgatgtgaatatagctagctgcaggccaacagaccctggaaaacaggaacataggcaggcacacagtgggtctgagccag

SEQ ID NO: 1651 - DNA, 804 bp, Mus musculus
gtccagcagaaggcgcgaatgaaggcaaagcctcccacccacctgcaatgtgtcgactgagggtcttgctgctgctgctccccttggccttcgtgtcctcctctgctctccccatccatgatgtcgactctcagcagaacacctccgggttcctgggccttcagaggcttctccaaagctttagtcgactgttcctaaaaaatgacctgctacgagacctggacaacttcttctcctcccccatggacttccgagaccttcctaggaacttccatcaggaagagaaccaggagcacagaatgggcaaccataccctctccagccacctacagatagacaaggtgactgacaaccagacaggggaggtgctcatctcggagaaagtcgaggcctccattgagccagaacggaacccggaaggggactggaaggttcccaaagtagaagcaaaagagcccccggtgcctgtgcagaaggtcaccgacagcttgcacccagagccccggcaggtggctttctggatcatgaagatgccaaggcggaggacccagcccgatgtccaggatggaggccgctggctcatagaaaagcgacatcgcatgcaggccatccgggatgggctccgtggaggcgcccgtgaggacagcctggaggatggggtccatatcccccaacacgccaagctgcctgtcagaaagacacactttctctacatcctcaggccatcccaacagctgtaagtggggaccagatgtcccacaccctaccccaacaccatatggaaataaaggttttcttacatct

SEQ ID NO: 1652 - protein, 245 aa, Mus musculus
PAEGANEGKASHPPAMCRLRVLLLLLPLAFVSSSALPIHDVDSQQNTSGFLGLQRLLQSFSRLFLKNDLLRDLDNFFSSPMDFRDLPRNFHQEENQEHRMGNHTLSSHLQIDKVTDNQTGEVLISEKVEASIEPERNPEGDWKVPKVEAKEPPVPVQKVTDSLHPEPRQVAFWIMKMPRRRTQPDVQDGGRWLIEKRHRMQAIRDGLRGGAREDSLEDGVHIPQHAKLPVRKTHFLYILRPSQQL

SEQ ID NO: 1653 - DNA, 31516 bp, Homo sapiens
tgaaagcggaaaccccagcgtcagggcagtgcctgcccagccccctaccttccagctaagcaacccccctgcaaaaccctcagcccccaggtacttgatctgatgcttcccgtatccccattcagcagcagctccccagtgaccttccttctcttccagtctagatcccacacagcctgtcactgcactcttttttttttttttgagctggagtctcgctctattgcccaggctggagtacagtggcacaatcttggctcaatgcaacctctgcctcctgggttcaagtgattctcctgcctcaccctcctgagtagctgggactacaggtgcctgccaccacgcccagctaattgttttttgtttttttttttttggtgtttttagtagagacggggtttcaccatgttggccagaatggtctcgatctcctgacctcgtgatccacccgcctcagcctcccaaagtgctgggattacaggcgtgagccaccacactcggccctcactacactctttctctgacaataccgtcaacactcctgcctcaccgtcctgcagccacactacccaaccaatgcctagcctggatccatcagttcctctctgggctgagaaatacacccctagcccgccacggtggctcacgcctgtaatcccagcactttgggaggtccaggcagggggatcacttgagcccaggagttcaagaccaacctgggcaacatagcaagacccccgtctctacaaaaatcaaaaaattagccaggtgtggtggcacatgcctgtagtctcagctactcaggaggctgaggcaagaagattgcttgaacccaggaggctgaggctgcagtgagccatgattgtgccaccgcaccccagcttaggcaacagaagaatatcctgtataaaaaaagaaaaaaaaaaaaaagcacttcccatcatcttctggggcccatttctattcttgtaggctacaaacatatcccgtcacctcaaggctctctcagaactgaaaaggacactcccacttacctctgggaaacattttcttccttctgaacctaagagaagattaattataacctctgttctaccctcaggtccaagaaccacctaatagaggctgggcacggtggctcacgcctgtaatcctagcatttggggaggctgaggcgggtggatcacgaggtcaggagttcaagaccagcctggccaacgtggtgaaaacccatctctactaaaaatacaaaaattagccgtgcatagaggcaggcgcctatagtcccagctactcgggaggctgaggcaggagaactgcttgaactcaggaagcggaggttgcagtgagccgagatcgcaccactgtactccatccagcctgggcaacggagcaagactccatgtcaataaatacatacatacatgcatacatacatacatacatacatacataaatggggggacacaggagctagaaggtggagtgagaaaggtctctgtgggagtgtgagggtggggggcaggtgctgagccaggacacatagtactcactctggaacattccaggggggcccagatcctccagaccaaaactggaaaagctcagaggcctggataggacacaaagaaaaatggttggtcagtcccctgtggacagctgcagccccatccatccccctttgcccccacgtcccacaatccccaacctggaccacctgaggaccagtgggacccagtttggcctgcagagaaggcgcggagatgagctgggcagaggacatggttgccattgtctggaaagccttgtccttggaaacctggtcctggaggaggaggcggaagttcatgtgagaggggcatctcagtcaacatggcaagagggggatggtgccagggtggggtgaagacggggaggtgcagaggtggggagtcaaggcaaagggttagtggccgggcatggtggctcacgcctgtaatcccagcactctgggagccggaggcgggcagatcacttgaggtcaggagttcagtatcagcctggccaatatggtgaaaccctgtctctactaaaaatacaaaaactagccaggtgtggtggtgcacacgcataatcccagctactagggaagctagggcacaacaatcactggaacccaggaggcagaggttgcagtgagtggagatcgtgcccctgcatccagcttaggcgacagagcaagaccctgtctccaaaaagaaaaaaaaaggcaaaggcttgggttgggggagggttgaacctctccccacagccctctgcccctcctcagggacagggcactagtttggagtgagcgtgggtgggaggatgggcagaggaacttaccacgttcagagcctgcccgtgggggtgggggagggtgccaaaggaggaaagaaaacatgacttaggaagtacggcccggactcccccacctccctgccctacccgcccgcacagccccgccaccctgagctgagcagtgccaagggatggatgcgcaacaggaagtggaggtggccagccctggaggggaaaaggggctccctgcccagaaagacagtgatgggggtttctagaacaaggaaacccagaaggttcccagatgtccaggagacaggaaatgagaatttcagagccagcgggaagacaaggtaaatgtttcctaatccagacagaacagacagggaacacagaaggtcgagaacagaccggaagggaagggtttcagacctagagagaaagaaagggaaagctgctggatacaaaaaaaaaaaaaaaaaaaaaaaccagaagcgaccgtccccaagtccagaaaaagagacagaaaaacccccacacacccagaagggggagaaaatgagggtctccggccaacaggaaccaggaaatccaaaggatgaggagaaggaaatgaatgaggaatctccaccaggaaatgaagatttctgggcacaaagagtaggcaggtcatgcaaaggtcaggaaatgggaaaacaaaccagcggagatgaagaggaggccttcacagcacaagagggggaagatatgagaccgccaggaagagggaaaggagggacaggagcagagggaagggagggggacaggaacagtggtcaagggaggggaccgacggcccatccttcctgctgtcctgagcaaaaccttcagcctcctccatgccatcgctccctgcccagggtctcagcaaccgcaccaccatccctatgcatctccctttgtgggccactgactccccaccctggatgactgcaccccccgccctgaccacagaggtccctcacctgaggtctctgtccccctctgtctctgggtctctgtctccctctgtctctgggtctctgtccccctctgtctatgggtctctgtccctctctctctgggtctctgtcctcctctctttctgggtctctgtccctctctctctgggtcttggtcccctcccccaagtctctgtccccctctccctgggtctctgtccctttctctctgggtctcagtcctccccgctctaagtctctgtccccctctccctgggtctctgtccctctctttctgggtctcggtcccccacccccagtctctgtccccctctcaggatgtctgcattggtccctaccttcaacttggactggatttcccttgatttccttcgggccaaaacctggatgtgactagaaacctggaaggatcaacggagaagcagattcaggccacagccaccgcccctgtgttcactaccccttctctccctccaggtgcctcactgagctgctggaccatgaaaggtgaaaaacacactgaagatgagagccatctcgggagcacccgaacacagatgtccataaaggagctcgtgaacaccacggaccctcccgggacccatcccatccaggcctccttcccctccaccatgctctctctgtggctactctgggtctaacacaaccactagaaaaactatccccaaacaggcacagtgagagcacacgaacagacatgctgatacagttcggacattcgtcccttccaaatttcatattgaaatgccatctccagtgttggaggtgaggcctggtgggaggtattggatcatggaggtgaacccctcatgaatggctttgcaccatctccttgatgatgagtgacttctcactcagttcacacaagatctggttgtttaggccaggtgtggtggctcacgcctgtaatcccaacactttgggaggcctagatgggcagatcactggaggtcaggagttcaagaccagcctggccaacatggtgaaaccctgtctctactaaaaacacaaaaattagggctgggctcagtggctcagctgtaatcccagcactttgggaggccgaggcgggtggatcacctgaggtcaggagttcgagaccagcctgcccagcatggcgataccctacttctactaaacatacaaaaaattagccaggtgtggtggtgcgcgcctgtagtcccagctactcaggaggctgaagcaagagaatcgcttgaacccgggaggcggggcttccagtgagccaagatcacgccactgcactccagcctgggcaacagagcgagactccgtctcaaaaaaatatttaaaaaatgaaaaaataaaaatttgccagatgtggaggcgcatgcttgtaatcccagatacttggaaggctgaggcagcagaatcgcttgaacccggaaggcggaggctgcagtgagctgagatcacggcactgcactccagcttgggagacacagtgacttttctctcaaaaacaacaacaacaaaaagatctgggtgtttaaaaagagtctgggacctctgtctttcttctgttgctcccactttccatgtgccaggcctgctcccactaccccctccgccatgattggaggcttcctgaggcctcaccaggagcagatgccagctccatgcttcctggacagcctgcagaactgtgagccaaaataaagctcttttctttctttctttctttttttttttttttgaggtggagtctggctctgtcaccaggctggagtgcagtagcacgatcttggctcactgcaacctccgcctcccgggttcaagcgattttcgtgcctcagcctcccgagtagctgggattatgggcacacactgccactcccagctaatttttgtatttttagtagagacggggtttcaccatgttggtcaggatggtctcgatctcctgacctcctgatccgctcacctaaagtgctgggataacaggcatgagccactggcccagcctaaagctctttatcaattatccagccttgccaggcacagtagctcacgcctgtaatcccagcaatcccagcactttggggggctgaggtgagtggatcacctgaggtcaggagttcgagaccagcctggacaacatggtgaaaccccatctctactaaaaatacaaaattacccaggcatggtagtgcatgtctgtaatccctgctactcgggaggctgagacaggagaattgcttgaacccgggaggcagaggttgcagtgagccaagatcgcgccactgcactccggcctgggcaacagagctagactccatttcaaaaaataaacaaatacataaataacccagcctcgggtaattctttatagcaatacaaacggactaacacacatgccgagaagacagatgaacgcacaggaagcagcttcttccttgaacctgaacctgcccatgcgaggatgaccctaagaagaccggcccatcccagacagaagcccacaagtccattccgagacctgttttcgagttcgggtcttccccgttctcagcttgatgtagcgggcgatcagttcattccgacctgaagattcaaagacggaacagagttagttagactttcaacagaacttccccacagcatggacaccagggaagaagaaagcagcatgggtccccaaaggtctgcagcaagtgggctgccggtcccctcagctacgtggaagccagactgcttgggttcaaatcccagctccatcacgcactggctctgtgcgaccataagcaaatcacttaacctagctgtgcctcagtttcctcatctgtgcaaatggtgatgctagctcctacttcagagtgctccataaaccttggttactgtcattattcatcagtgggggccagggcaaaagacagaagtagactcaccatacatcttgccttcatcagacaaaattattttccggcggccgcagggtggatagatggccagggcctcctggaagctctgctcaatgtctgggctccacaccccctctgcatccgggcccccgtcacccccagccccctcactgccgccggtaccctcctcactgccttcctcactgcccgtccagccgctgccatcgtccagggcggccccagcccggggttcccccatctgggcctggaggaacacagaactcagcaagcttcccccaaaccccaccctcaagggacttgaagctgagagggctgggactctggaccactgggtctgagggaggaggggctggggacctggactcctgggtctgagggaagaggagctggggggtattcctgggtctgagggaggaggatctggggcctgaactcctgagtctgagggaggaggggctggggcccggactcctaggactgagggaggaggatctggggcctggactcctgggtctgagggagcgggggctggaggcctggactcctgggtgtgagggagaaggggctggggtctggactcctgagtctgagggaggagaaggagctggatttcttggaaagctgaggatgggagtgttctcagagtttccagaggaactcaattgtgatgaagtcacaatgattaccctagagtaatgccgagggccatgaaggctaaaggttcgggtatgaattacgggttttaaagaagacaggaggcaaaagttagtggtggggaaggaaggtgtgggtgaaacttcccctgtcccaccccaagaacaggtggtaagatgtgagcagcagctgccagaaaagaagaggggccaagcaagactgaggggaggtctagagagagggggacagagacccagagagggagggggacagagacccagagaggggatggggacagagaccagcaagggggggggacagagacccagagagagaaggggacagagaccagagagagagggggacagagaccagtgaggtggggatagagacccagagacagagggggacagagaccagagagagaaggggacagagacccagtgaagggggggacagagaccagtgacggaggggacagagacccagagagagagggggacagagaccagagggagggggggacagagaccagagggagggggggacagagaccagagagggggacagagacccagagagagggacagagacccaaaaagagagggagacagagacccagggagagggggagacagagaccagaaagagggggacagagaccgggggggggggacagggaccagagagaggggtccagaggcccagagagggagacagagacccagagagagagggtgacagagacccagagagagggggacagagacccagagagagagggacagagacccagagagagaggggaccagagacccagagagagggggacacagactcagagagagggggacagaggctcagagagagggcaacagagacccagagaaagggagacggagacctagaaagggcagggacagagactcagggcagcagctgaggccgagaccaggagagacccacagaaccacaagctgggggacaggggcgccctgccatcagaagagccagaacaaagggcccaggcgtcccctcccccagcttcccacaacccccatcaggggaggggcttgcctgtcagggcgactcccctccggcaccgggccccgcccctcccctcccccgtgcgccgtgggctctgatccaactcaagttcccagtgactttccggaggccgggaacagggaaaactttttccaatacagtcagatcccgcctccccggaggctccatgtcctccacagctttcccaggaccccagagtccaggcccctattcccctcctcccgccgaccatagcagacaaagaccccagccaagcccagtggcgctgcggcgttcaggacccccgtaggccaaaatcccagcccagcccttccccatgtggccagacaaagggacggtggagccgggtaagaaaggtccccctaatttcccgccccagaccctaaacctccaaagaggcaagacttaagatccagaaagccccgtaacctcccctcggccaccccagaggccctcccttctccgtaagaaggaccaaatgccccccagattacacaaggggtccttctcactccaaagtgacaccgccgcagacgcacgccccacaccccgccagcgcccttggcccgcacccgctcctgcgcgcacgcccaaactcagacccagccgcaggcaccctaactccggccagagttcccactcctcactgaggctcggtcacgggagcaaattcgggcccccgggcaaaaagagggctgcgaaccattcagagacggtcccgcaaacgcacgcctcacctcctaagaagcaactccccaccccaactcacacaccccaaagcaggatccccgactcccgccggcgccttcctacctcccggcctggggctggggagccgcgggcgggcggggcgctgcgagggagaaagttgccgggagctttgtttgggaaaagtgggagggaccggaggggggggcgggcccggccggcggacagcgggaagggggatccgacggtgacagtttggggaaggatttttgctttgggagagattagtctatctcggggctggtaggaactcaggatttgggtgcttgggaaaggagggggattgggggttcggactccaagtcggagggaaaaggctgataggagccagaaacccctgatctgagggaggagaggctgggggctgggactcctgggtctgggggctgggactcctgggtctgggagaggaagcggctggagagagatatgggctcctaggtctgagaggggacggggctaggcgcctggaatcccggctaccctcgtgtttgtgtattgggggtgcggaagtgatacgaatacaaagagtctttactgttaagccctgaggttttttttctttttttctgtttggtttttggtttttttgttttttgttttttttgtttttttttttttttgaggattggggtctggggatgggttttgactgattcctatgacgacctggtttccttgtgacctcaccacagttaagagtcgtgggcaggaccaccgggagtttattggaggcccacgtaggtgcagattcctcatctacaggcgctagtggactggagacggctggcggctgtcccgggacggggaagagagctttggtgcctgagggaagatggcttagggcccggtcccttaagggtgaaaggctgcgtgttcaaaattacgggactagagggggctggagtccggacctgaggtcctcagggaaaaggaagtctgattctgggttccttggaagatgaaatataagactggatttagggtttccggagacaacgggactttttagtggagcgggagcgggaaaaccagaagggacacggagaaaaggttccgaaacagatacacaattagagtgagagctaaaagggatgcttgtactccggtgtctccagtaggaggagcctaggactggaacttggggtgatgagggcaagatctgggacgcaggggcgtggtccagtgcaggggcgtggcccagtgcaggggcgtggctttcagccaaggggcgtggccattgcgattgggcgggactccgaaacgagggccgcaatcagagaacaccgccaggacttccaggacttggtctccaggactgaggtcaactgacgggggcgtggtctgactgtgtgggcgtggccagggaatgaactcacggctctggcttaaggggtgtggtgaacgaaggatggggcgtggctctgtcacgaagggcgtggtcatggagtagaggcccgggctcctgggtgaggccggcaagtttggagcgtggtcagacaataggggcgtggctacggctcgcggagcgcaaccaacgctctagaccagacctgggctcgagaccataactgtttggctttaacagtacgtgggcggccggaatccgggagtccggtgacccgggctgtggtctagcataaaggcggagcccagaagaaggggcggggtatgggagaaggtgaggattgagatctggtggtgaacgtgggcgaaagtgaggaaaagaccattggatgaggccgggtgctgtggcttacgcctgcaatcccaacactttgggaggcccaggtgggcggatcgcttgagatcaggagttcgagaccagcctgggcaatatgtcgaaaccctgtctctacaaaaaatacaaaaattagccgggcgtggaggcgcgcgcctgtggtcccagctacttcggggggctgaggtgggagaatcacctgagcccggggaggtcgaggctgcagtgagccgtgattgtgccactgtactccagcctggactacagagtctcggtctcaaaaaaaaaaaaaaaaaagcatatgagacagaacccagaagagccagacctgggagaagacggggcctggcaaggtggagggtgtgggagtagaagaaagaagcagtgggggaaatgagcgcggtgtgggagttgcctgaactggggaggcgacctgggcaaggtgctggagaggggcgtcttgggtgggggcgtggccactgtgcggggctctgaccccgacccttgccacagcctccccacctgcccccgcaaggcggcatctgctggtcctgctgctgctcctctctaccctggtgatcccctccgctgcagctcctatccatgatgctgacgcccaagagagctccttgggtctcacaggcctccagagcctactccaaggcttcagccgacttttcctgaaagtaagcgatggcggggggatgggggaagaagtactgagaagaggttcagggacacagagtgggagatggttcagggccaggcagggggacagacaggatgagagggcaacagggagaccaagagataggaagagggaagggactgggcccaggctataatcacagcactttgggaggctgaggcagaaggatcattggagcccagtacttggagaccagcctgggtaacatagtgagaccctcatctgtacaaaaaaatataaaaaatagttgcaggtacatgcgcctataatcccagctgcttgggaggctgaggcagaaggatcccttgagcccaggaggtcgaggctgcagtaagccatgatagcaccactgcactccagcctggatgacagaacaaggagaccctgtctctaaacaaataaatatatacgtgcataaataagagaggaaaggtaacaggcaaagagagaggagatgggacagagacaagagactggggaaagagacaggaggagagggggatggggacagaagaggaacagggatagtaaggcaatgggactgagaatagagagagaattcatgggggatggaggccggaggttaggccctaagtatcagagggcagaaagtaaaggggatgggagggacttggggcaaggcctcgggagcatcctagcagggctgcagaaggggctgtactgaggagatgtgaggtccagcagctcaccagtccctcctccggccccagggtaacctgcttcggggcatagacagcttattctctgcccccatggacttccggggcctccctgggaactaccacaaagaggagaaccaggagcaccagctggggaacaacaccctctccagccacctccagatcgacaaggtgcctatgcagggaagcccttcctgaagtccccttgggatccctccatcccgccatccctcgtgctgcagtatctgttgggagggaaggagggcggaggaggaaagcaggtttgctctcactctctcatcggatcctcacagaggaccgacaacaagacaggagaggtgctgatctccgagaatgtggtggcatccattcaaccagcggaggggagcttcgagggtgatttgaaggttaggacgtgccccgccgtcaaagtgtccaggcccaaacattttctttttttcttttttaaagaagagtctcactctgtcacccaggctggagtgcagtggcacgatcttggctcactgcaacctccgcctccgaagttcaggcaattctcctgtctcaagctccttggtagctgggattacaggcacccgccaccacgcccggctaattttttgtatttttttagtagagacagggtttctccatgttggtcaggctggtcttgaactcctgacctcaagtgatctgcccatcttggccttccaaagtgctgggattacaggcatgagccaccatgcctggtgaggccctaacattttctgtagtttaggaggacaagaagaggaactgaccctcctactcctctgtgtggaacttcctccttctgagcctcagttttgccatctctcaagtggggcaatccaactgtcagaaatgagatttttgacctcagaatacatctgcaagggtttagtagaccctagagggttttgtatcaaagtggttttctttttttttttaactacataatagtcaatcaaagtgtttctatgagcaccaaaatgttttataaaccaagaagggtttttaattctaagtgcttggaaagcttcaccctcataaaccccaaattgtgtttttgtctcaaagtaagtgctctgcaaacttcagagtatttttcaatctatcccaaagtggttggtaaacctctccattataaactccaaaatgtttttgttgttattgtggttttgatttttggggttttttttgtttgtttttttggtttttttttttgagaatggagtcttgctctgttatccaggctggagtacagtggcacaatctcagctcactgcaacctccaactcccagactcaaatgatcctcccacctcagcctccggaatagctggaactacaggcgcggaccaccacacccagctaatttttctatttttagtagagacggggtttcgccatgtttcccaggctggtctcgaactcctgagctcaggcaatccgcccgcctctgcctcccaaagtactaggattatagacatgagccaccacacctggcccaaaatgtgattttcttcttctttttttgttttttttgagatggagtttcgctctgttgcccaggctagagtgcaatggcacaatctcagctcactgcaacctccgccactgaggttcaagtgattctccagccctagcctcccaagtagatgggactacaagtacgtgccaccacgtccagctaatttttgaatttttagtgtagacagggtttcgccatgttggccatgttggccaggctggtctcgaactcctgacctcagctgatccacctgcctcggcctcccaaagtgctgggattataggcatgagctactgcgcctggcccaaaatgtgatttttaataccaaagagctgtatgaatgctaaatgcgttgtgtatttcacctttggtaaacttttttttttttttttttggagacgaagtctcgctcgtcccccaggctggagtgcaatggtgcgatctcagctcactgcaacctccatctcccaggttcaagtgattctcctgcctcagcctcctgtgtagctgggattacaggtgactgccaccacacctgactaatttttctatttttagagagacaaggtttcatcatgttggccagactgctcttgaactcctgacctcaggtgatccaactgccttggcctcccaaggtgctgggattataggcgtgagccaccatgcctggccaggccacctttggtaaacttctacaagtgattctaattatgaagtgctttgcaaaatcagggtatttttaatcctgaaaagttttaagaaacccaaagagcttgatacatccatatgatacccacgtacacccatgcaatatcttcattttaaaaatgtttatttaaaattttattttaaaaatttcaggacaggcacagtggcttacacctataatcctagcaatttgggaggctgaggcaggaggatgacttgagcccacgagtttgagatcaccctgggcaatagagggagtcttcatctctacaaaaaaatttaaaaagtaggccaggcatgctggcttacgcctgtaatcctagcaatttgggaggccaaggcaggcagattgcctgagctcaggagttcgagaccagcctgggcaacacggtgaaaccctgtctctactaaaatacgaaaaattagccgggcatggcagcctgcacctgtagtcccagctactctggaggctgaggtaaaagaattgtttgaacccgggaggcagaggttgcagtgagccaagatcatgtcactgcactccagcctgggggacagagtgagactctgtctccaaaaaaaaaaaaaaaatcaaaaaagtagccaggtgtggtggtgtgtgctgtggttccagctacccagaagcctgaggtgggaggattgtttgagacgaggaggttgagtctaaagtgggcccagatcatgccactgcactctagcctgggcaacagagtgagactctgtctcaaaaaataaataaataaataaataaataaaatttcaagactacagaaaagttttttttaaaaaacatactttattattttggaaatggagtctccctctgtcacccagactggagtgtagtggtgccatcttggctcacagcaacctccaccttctaggttgtggaaagtaaaaaagtttctctttaaagtttttattaaataataaatcacaagtgttagaaataatatttttaattaactttttttaagcctctttgctttgtgttagtaactcttttttaaaccatatcttatgtagttgttagatataaggaaataagtaccttctgtgtccttgtacgttaaccaagatatttggtctcgacgtgctcaagcatgtcccagctcacagcttatgccctttccttatttggaaatgttattacttctccaagtcttttggcaagcaacttcctcttttcctttgttctccattgcctttacctatttaagaaagttttttaagttgttagccaattgggtttagcttagactgtgaggtccagctccaaccaatggagacaggacacagcagtaaggacccaatgcataagggataaatattcctgcctttctttgttcattgtgctctcctggcaggattgctgatgggcagcaccctttctacagaaagtaaaattgccttgctgagaaaactttttgtctgaatgctaatttttccttgcgacaccaagaaacaagcattttgattctaacacaggttcaagtgattctcctgcctcagcctcccaaagagcagggataacaggcacgcactacaatatccagctaatttttttttgtttgttttttgttttttgtatttttagtagcgatgaggttttgctatgttggccaggctggtcttgaattcctgactttgggtgatccacccacctcggcctcccaaagtgctgggattacaggcaagagaagtttttcttaaaatagtacaacagattttaggctcttctgtatctgcccaccgagctactctgttcctggcttagagaaccaggagaaggggaaggggaatcacctgccacatgctggaggttggagcctgtggcaccatggcttgcctcactgcagttggtggtggcaacagaggctgcagtgtggccagagtggcttttctggctttgcccgcccagccactctgagaaaggctggaggagaaagtgaaggaggagtcacctgtggtgaggtggagtttggagcttgcagatggcacggctctgtggctcacctcctacagttgtggcggtgacagcgagggagacttcagcctgactggagtagaagggtgctcgtgaaggctagagtattgcctccaagatgcagcagtggatactcaggtttcaggagactccactgtccatggcgaatccatggtctgccagcgcagttttagagagagaatgtgccaccgcaggtgtcatcctcatgtgcaccctggcaggtagccatctgaagatttcaaggacaacctggcaggggagcagaccagcgacacttcctctgaacaggttcttgctgttcacttgacagactcagcaactcaggcaagtgttcacatggaagatatcctggaaggataccaagccagtgaaagctcagatgaaaatgccccatggctttggaaggccaatgaatgtgccaaggaaaaaggtgccatggaggatcctctggaagacctcgccaatgaaatttcagattaggacaccccactggatttgaaggccaaagaacgtgccaaggaaaaagttcccatggaggataccctggtggaagaccttggaaacgaaagctcagataaggatgcctcactggacttgaaggttgacaaacgcatgaaagaaaaagttcccacagaggataccctggtgaaagaccttgccaatgaaagctcagatgaggacgctctactggattgaaggctgatgaattcaccaaggaaaagttcccacggaggataccctggtggaagaccttgccaacaaaagctcagatggggatgttttgctaaatttaaaggctgacaaatgagccaaggaaaaagttcccatggaggataccctggtggaagacctcaccaacgaaagctcacatgaggatgctccactggatctgaatgccgacaaatgtgccaaggaaaaagttcccatagataatccagtgaaagaatttgccaacaacatcaaggaaaaggaggccccatgtaatgtgaaggcaccctagggagtccaggtaaatgatttcaaggatgacctggcggggatggtgatcagtgaaaagtccccagaagcagccctatctcttcacagggcaaaatgagatgccaagaaaaaagattgcttcgccattcttgtagcagagcttcctgaagagatgtcctcagggcaagtgctggccgttgtcaccgtgaaaggcatcaagaaaaatggtggctctgaggacagcttttctaaaaccagtaatgacaaagactcttcctgtagtggagacactcaagcttctggagcagatatggaagagtccaatcatgcagatgaccatcagcatatgccaacaagtactctcccagcacctgcagaaaaaacaatagagacaaagcctgaaaaggcagaagaaatgtaacccagtgagttcaaggaggatgaggatgctgaagagcctgacctgacctgttgtgacctttgttttttatgctagaagtccctacagattttttgaacacctggaagggccgggtcacaagacctcaccctggcccagcaaccatctggaccgtgagagttttggggattttgctactctctctggacttttacattctcttaattttttaaaaaatattctttctttaacctgttttaagatgcaagctgtcattgcgtcatcatagttacattttattactcaaataatttttcaattgttttactagttttttttggatctttgtccactggttttagagtttttgtaattttgataaatgatcttttatgctttgtatcattttcttaatgacttaccttagtttttaacaaatccatggtacagtaagttatattaagacatagtatttttatgtttttttaaattatactttgggttctggggtacatgtgcagacatgcagttttgttgcataggtgcatgtaccatggtggtttgctgtacccatcagcccgtcacctgcattgggtgtttctcctgatgctatccctcccctgaccccccaccccccaccgacaggtcctggtgtgtgatgtttcccttcctgtgtccatgtgttctcattgttcagctcccacttgagtgataacatgcagtattttgttttctactcttgtgttggtttgctgagaatgatggtttccagcttcatccatgtccctgcaaaggacattaactcatccttttctgtggccgaatagtattccatggtgtatatgtgccatgttttctttatctagtctatcactgatggacaattgggttggttccaattctttgctattgtgaatagtgccataataaacatgcatgtgcctgtgtctttatggtaaaaaaaaatagtataataaatatccctatagtctcttttccataaaccaaaatttcttaaggttggcatcattggcatgtggggctggataatctttattgtgggagctgccctgtgcactgtaggatatttgataacatccctgggctctatccactagagagaagttgcctcctgccaggcacagtggctcatacccgtagtcccagcactttgggaggcagagacgggcggatcatgaggtcaggagttcgagaccagcctggctaacgtagcgaaaccccgtctactaaaaatacaaaatatggggccaggcacagtggctcacacctgtaatcccagcactttgggagaccgaggcaggcagatcatgagatcaggatatcaagaccatcctggctaatgcggtgaaatcccgtctctagtaaaaatacaaaaaaattagccaggcatggtggcaggcgcctgtagtcccagctactcagaaggctgaggcaggagaatggcgtgaacccgggaggtggagcttgcagtgagccgagatcgtgccactgcactccagcctgggcgacagagcgagactccgtctcaaaaaaaaaaaaaaaatacaaagtatggccaggagtggtggcttacacctataatcccagcactttgggaggccgaggcgggcagatcacctgaggtcaggagttcgagaccaccctgaccaacatggagaaaccccgtctctactaaaaatacaaaattagccgggcatggtggcacatgtctgtaatcccagctactcaggaggctgaagcaggaaaatcgtttgaacccagaaggtggaggtcgcggtgagcgaagatagcaccattgcactacagcctgggcaacaagagcgaaactccatctcaaaaaataaataaataaataggctgggcatggtggctcacgcctgtaatcccagcactttgggaggccaaggcaggtggatcacctgaggtcaggaggttgagaccaacctggccaacatggtgaaaccccgtctctactaaaaatgcaaaaattagctggcatggtgccatgcccctgtaatcccagctactctggaggctgtggtgggagaatcgcttgaacccaggaggcagaggctgcagtgagccgagattgtgccactgcactccagcctgggctacagagtgagactccatctcaaaaaaaaaaaaaaaagaacacagtcatgttggattagggcccaacctaatgacctcatcttcaccaattatatcttcaatgaccctagttccaaataaggccacattctgaggtattacaggttagaatttcaaaatatgaatttggggaggaaacaatatggttgtttgttcgtttgttttttaagcctgggtcttgctctgttgcccaggctagagtgcaatggcacaatcttgactcactgcagcctctgcctcccaggttcaagtgattctcctgccttagcctcccaagtagctgggattacatgagcgcgccagcacgcccagctaattttcatatttttagtagagacaggattttgtcatgctgtccaggatggtctcaaactcctgacctcaagtgatctgcccacctcagcctcgcaaagtgctggattacacacatgagccaccgcgtccagccaggaggaaacaatttaacacataacaatctcctgcgcggcttctcagacctcatcttactaaaaggcagactgattcagcaggtctgagtggggtgggacctattaatttgcatacctaacaacagcagcccaccctttgaattgcaaggaccaaacagacactcagtccatattcaaactttctccctcaactcaaagctgtccttgaaagctttattttttttttttcccttgagatggagtctcgctctgtcacccaggctggagtgcagtggtgcgatctcggctcactgcaagctccgcctcctgggttcatgccaatctcctgcctcagcctcccgagtagctgggactacaggcgcccgcaaccatgcccggctaaatttttttgtatttttagtagagacagggtttcaccgtgttagccaggatggtctcgatctcctgacctcgtgatccgccagcctcggcctcccacagtgctgggattacaggcatgagccactgcacctggccccttgaaagcttttgattcaggatcaatgaaggatcacacattgcatttatggtcatgagtcttcggtaaacccaagagcttttagtcctaaagtgctttgtacatttcaaactgctatcctctaaacctcagagaggatttaatcctaaagtgctctagaatcccaacaggcattataatccctgaagtgctctattacctcccttttgaaagcccccaaacaaattttccaatcccaaagcattctgtaaacctcagagtatttttaatccttaagtgtaaacccaagtgctttgtaaacctcaaacagggcttttgaacccacaaagcatcctgtcatctgcaaagtgggctgaataggtcagtggggactgaccatcctggggtgctgtttggagtatgagagggtctccttgttcttcctccccaggtacccaggatggaggagaaggaggccctggtacccatccagaaggccacggacagcttccacacagaactccatccccgggtggccttctggatcattaagctgccacggcggaggtcccaccaggatgccctggagggcggccactggctcagcgagaagcgacaccgcctgcaggccatccgggatggactccgcaaggggacccacaaggacgtcctagaagaggggaccgagagctcctcccactccaggctgtccccccgaaagacccacttactgtacatcctcaggccctctcggcagctgtaggggtggggaccggggagcacctgcctgtagcccccatcagaccctgccccaagcaccatatggaaataaagttctttcttacatctaacaacaccatctcctttcactatttatccccaaccgcctgccaaccaggccatggcaaaggcccccagtcccagctctgagcatgagagctggctgtgctagctcttgcctaagtctcccaggcttggttttctcattcaggcattgtctgtgctgtagccccatctgtccactcagcacccaaccctgtcacctccagccctgtctgcactcccaactctcagctatttttttttgctttttttttttttttgagaacagggtcccactctgttacccaggctggagtgcagtggcacaatcacagctcactgcagccttgacctcccaggctcaggtgatcctctcacctcagcctccccagtagctgggaccacaggtgtgcgccaccacgcccagctaattgttgtattatttaacatagggatctccctgtgttgctcagggtggtcttgaactcctgggctcaagcgatcctcccacctcagcctctcaaagtgctgggattacaggcttgagccactgtgcccggcccccaactctttcactccagtcctctctacttggcccccgtactgttactgccataaaaatgggcacaaacttggcaacttaaaacaacacaaatgcattatttcacatatcatcctggtcagaaatccaggatggctccgctggccctcagctctgggtttcacagggtgtcagccacccgagctctcattgggaggctctgggaagaagctgctttcaagctcattcagattttaagcagaatcgagttcctgggcttgtgggactgaggtccccacgttcttgctggctgtcagctgggggccacccatgcttccacgcttagctccaagaggcctctctccagttactgcaggtggacctgacatcccagagccacagcccagtatcatggcgggactctgacttccccttgtgtcccatctctggtatgccttcctcttctggcagagacagtcctctgctttgaagggctcatgtgattggactggacctaccgggacaacatatttacagttttcaggaattatggggtgatcatctttgggggaccactatccagccccactcaggtccttcccatgtcatctccagcctcgactctgtggtgtccacacccacctatccttgtcttcatcttctcattctctcactaccccctgacggagagactccatctccaacttgctatttctctctctttgtccctctatctgaccctccctgctcaccacctcaaactccctcacttccaggcctgatgccacgtccaaacttggaagctcacagagcttgcctgtggtggtctgtccactttgtccttcctcagagcatttcctgtcccctctgagaatcctccgtcatgacccatcaaggagaaagctgatctgatcctccccagtgctgagtcccatctaggacccggacacggcatgtactctctcccttgaagcccaagctgagcgctggatcaccccatagactcacacactcaggaacccaacagtgagtacaatgaatacaagtcaacttttttttttttttttgagaccgtctcgctctgtcgtccaggctggagtgcagtggcatgatctcagctcactgcagtctctgccaccacccaagttcaagtgattctcatgcctcagcctcccaagtagctgggactacaggtgctcaccaccacgcccagctaatttttgtatttttaatagagatggggttttaccattttggccaggctagtttcaaactcccaacctcgggtgatctgcccgcctcagcctctcaaagtgctgggattacaggcatgagccaccacgcccggccaagtttggctgcttctaaggcctctctccttggcttgaggatggctgctttctcactgtatcctcacattgtgtctttttgttttttttgtttttgagacagagtctcacactctgtcgcccaggctggatggagtgcagtggcgtgatctccaccttccaagttcaagagattcttctgtctcagcctcccaagtagctgggactacatgcacgcgctgtcatgcctggctaatttttgtattttttagtagcgacagggtttcaccatattggccaggctggtcttgaactcctaacctcgtgatccacccacctcggcctcccaaagtgctgggatgacaggcgtgagccactgcacccggcccacattggcttttatttgcaattctagaatagggcagtacctcattctataaagtaaaatgagtgttcccatgagccgagcagagaagggttgtttacgatctcggctcactgcaatctctacctcccgggttcaagcgattctcctgcctcagcctcccgagtagctgggattaaaggctcctgctgccacacccagctaatttttgtattttttgtagagacggggtttcaccatgttggccaggtggtcttgaactactgacctcaagtgatccgcctacctcagcctcccaaagttctgggattacaggcgtgagccaccgcacccagctaatttttgtatttttagtagtgacagggtttcatcatgttgggcaggctggtctcaaactcctgacctcaagtgatgcacccacctcagcctcccaaagtgctgggattacaggcgtgagctactgtgcccggccagggattacatttctttttttttttttttaattttttattacagaacaattattatctgtcatcaaactatcctttcagattcattttgaatacctcctttcttttttatttttctttgagatgggagtctcgctccgtcgcccaggttggagtgcagtggcgccacctcggctcactgcaatctttgcctcccgggttcaagtgattctcctgcctcagcctcctgactcactgggactacaggtgcctgccaccatgcccggctaattttttgtatttttagtagagacaaggtttcaccatgttagccaggatggtctccatctcctgatctcgtgatccgcccacctcggcctcccaaagtgctgggattacaggcatgaaccactgtgcccggcctcaattggtcatttcaaagttactttacttgtggccaggtgtggtggctcacgcctgtaccccagcactttagaaggctgacgcaggtggatcacctgaggtcaggtgttcaagactagcctggccaacacagtgaaaccacgtctctactaaaaatataaaaaattagccgggcatggcggtgggtgcctgtaatcccagctactcgggaggctgaggcagaagaattgcttgaacccaggaggcgaaggttgcagtgagccgagatcacaccactgcactccagcctgggcgacagagcaagactccgtctctaaaaacaaacaaaaaaacaaacaaagttactttacttgtaaaggttaaaacagaggggacttcctcatcatgctagctagaagatgtggctattatctctctctcctgtctcccctaaattctcagaggtcatataacttagtttcagcttgctgacatggaactgtaacatgagtgactccactggtctcttgggcctagtgcaggagctcggtccaaaccaatggcttcctgtaaaatttatttaacaaggcaaatctacagagacagaaagcagattcatggttatgtggggcttcacggaaaggaaggttgagttaggaataatggctaagagatgtagggctttgttttggagtgatgaaaatgttctaaaattaattgtgatgattgtagaactctgtgagtacactgaaaaccactgaattatacactttaaatgggtaaattatgtggtgtgtggatgataactcaataaagctgttaaaacaattagttaattaataattctattaaacagtttaccctgaacaactcagggcttaggggactaaccccctgtgaggtaaaaaatctgaagatcaattttgactccccaaaaacttaatgactaatagcatgctattgaccagaagctttacataaacagtagatgaacacatatattttatgatatatgtttttggggattttttttttttttgatacaggatcttgccctgtcacccagggtggagtgcagtggcacaatcatagctcactccaggctcgacccccctggttcaagcgatcccccctcctcagcctcccaggtaggcaggaccacagataaggctctcacaaccacacctggctaatttttgtatttttagtagagatgagggtttcaccatgttacccaggggtgtctccaattcctaggctcaagcgatcagcccaccttggcctcccaaagttctgggtttacaggcgtgagccaccatgcctggctgtgttatatgtattatatactatattcaaacaataaagtgagctagagaaaagaaaatgttattaaggaaatcagaggaagttaggagagggttaaaaaaaataaaatcgccgggcacggtggctcatgcctgtaaccccagcacttttagaggctgaggcgggaggaccacctgaggtcaggactttgagaccagcctgaccaacatagtgaaaccccatctccactaaaaatacaaaagttagctgggcatggtggtgcatgcctgtaatcccagctacgtgggattgttcaaggatgaactgtataagtcacaatggatctgcttctctgagcaaaccctaaaggataaagcattattcagcttgttgcagtctgccaatctaaaaagggtagtttcctgttgctttaattggaatgtttctggttactgatcttttgagctccttatcacatatttgttagttttttggatttccccttctgtaaattgcctgcttttctgtaaattcttggtcatttttttctgttgggttgttatctttttctttttgatttgtaggagttccttcaatcacctaccttttaatcccttgtcaattttatttttttattttatttattaattttttttgagacggagtctcactctgtcgcccaggctggagtgtagtggtgcgatctcagctcaccacaacctccacctcccagattcaagctattctcctgcctcagcatcccaagtagttgggattataggcatgctccatcacatctggctaatttttgtatttttagtacaaaaatacaaaatctcttggccaggccggtctcaaactcctgacctcaggtgatctgcctgccttggcctcccaaagtgctgggattacaggcatgagccaccacgcccagcccctggtcaattttagacaatgcaaatatcttccgctcgtccatcatctcatctctcatgatcttggcccttgggatccttgatgaatagaaacccttaatactgatgtaatcaaattaatttttttgacttatgattcatccttttgagatccctaaaagaagtcattaatactttcctacattttcttttattaactttatagttttaccttttgcatttagtgctttactagcagctggtctccactttacattattatgttatagaggaggaggggcctgaaagcctctcagtgctcaagatctttgaagacttaactgggcattagctcaattagagaggaagaaagcagtagaggatggggatggaccactatctcctgggcctcgcttcccccaagaaaatccatggacccacccacaaccactacatctcagactatttcagcatcttcctcccagtggcttcacacacctgggtgagacccccaacatctactcagttaccaggtctggtattccctgatatcatcctgattttttgactggaaaaaaagtgttaattcataagactttgggtttttttgggggggcaggggcaggcgatggagtctcactttgtcacccaggctggagtgtagtggtgtgatctcagctcactgcaacctctgcctcctgggctcaggtgatcctcccacctcagcctcctgagtagctgggaccacaagcatatgccaccatgcccggttaatttttataaattttttttgtagaaaggtggtttctccatgttacccaggctgatcttgagctcctgggctcaagcgatctgcctgcctcagcttcccaaagtcctgggattacaggcatgaaccaatgtgcccagacccccaacactattctaagcagtggggattaagcagtgaataaacaatgccccagcatcatgggatttggtgggggagagaaacaataaatatgtatcaagcaatggcaaatgctgtgaagaataaagcaacatgaggcagaaaggaaactctgaggggaccgagctcatcttagatagggtagtctctctgatatatacacagagggaggcactctgatatatacacagagactgaactggggtaatggagcaaatccggtccatggtaaatctggagaaagagactttcaggctgagggaatagcaagtgcaaaggtcctgaggttggaaatggcttggcttgatcaaaaacaaggaggccaaggtggacagagcagttattgatggagataaataggggataagatcacaaaagtagacgtagggtacaggagagcagaccatgcagggtctttggagcgtagtgaggagtttttatgttattctatttaaaatgggaagtgagctaagtgttacaattaaagaagtaacatatatgtatttactgatcaaaaagattatccggacttttgcttgtcactatgatggagtagctagtagctgactaactccccaccaaaaactataaaagctgaatacaagctaggcatgatggttcacacctgtaatcccaacactttggaaggctgaggcaggtggatcacctgaggtcaggagttcaagaccagtctggccaatatggtgaaaccttgtctctactaaaaatacaaaaattagttgggcatggtggcaggcacctgtaatcccagctactcgggagactgaggcataagagtcatttgaacacgggagatggggtttcaccatattagcaaggctgatcttgaactcctgaccttgtaatccacccgtcttggcctcccaaagtgctgggattacaggcatgagccatcgcgcccagccaaggaaattaaattctttccgagggaagataataccatccagtttttatattttaatttaaaaattaccagtcttgccaggaaacaagaccaaatgacagaaaaccaagagaaaaaacatacactagaagtatgtacccaaaggtgatccaggtattacagttctcagatacaggctttcaaataactataattaatatgttccccaaaaatagatgaaaagatggataatttcatcagagaactggaatctaaggaggagggagaatccaatataaattctagagctgaaaaataaattaattgaaataaaaattcagtagattagtcccacatcaggttagacacactggaaaacagatcaatagaaaatatctagattaaattacacagaaatagggtagaaaatacattaaaaacatatgagacatataggtcatggttaaaaggtctaatacatacatactggagtcctagaagagaggaaaaagacaatgaggaggaagcaatactaaagaactcctgggcaagaattttaaaaaactgatgaaagacatcaactcacagatccaaggtgggaggatcgcttgagcctgggaggtggaggttgcagtcagtcaagaatgtgccactgtactccagcctgcgtaacagagtgagaccctgtttccaaaaataaggcagaacgttgataattgctaaagctatgtgttaggtatatacgggttcgttatgtttactttatgtatgtttgagatttttttaatactgtataaagatatttttaagtaactgacactaaatactccaaataaaaggcacagattttctgatctacaactacatgcaacatggttgaatcttatatgacatttaacaaaagaaccagaaacaaaaatgtttctgtatggttttatttattctgaataaaaaaacaaataaagcttatctatgccattagaaattggggtaggccgggcacagtggctcatgcgtgtaatcccagcactttttgggaggctgaggtgggcagatcacctgaggtcaggagttcgagagcagcctggccaacatggtgaaacctcatctctactaaaaatacaaaaattagccagatacggtggcacatggctgtaatcccagctactcagaggctgaggcacgagaatcacttgaacccaggaggcggagtttgcagtaagacaagattgcgccactgcactccagcctgggccacagaaggagactttgtctcaaaaaaaaaaaaaaaaaaagaaagaaaaagaaaagaaattagggtaaaagttacccctaggagagtagggactggaaggagccatgaggaagaatcttggaggcaggtagtatgttgtatcttgatctcggtttagataacacagatgtgttcaatttctgaaaattcataaagcttatcacttatgatctatggactgttctatataaatattacacttcactaagagttttggtaaagtcaaaaatcagcagtcagcataaaacaaaacccaactatatgctgttacaagagacatgccttaaatataagcacacaaaaagatggaaagttacaggatgaaaaagataccctatataaacactaaccaaagaaagctggagaaatctctacatcaaagtagccattaaggcaaaaagcattgctagaagtaaaaaatgacatttcaaggtaataaaggggtcaagtcaccaggaggatataaccattctaaatctgtatgcatttaataatacagcttcaacatatataaagcaaaaatgacagaactgagagatggaaaaatccacagtcattcagtacaagaagcaaacagtgaagatattaaagatttgaacagcatgattgacaaacttgacctgacatagctgacctgcaggatacacactctgttcttttcttttttttttcttttttttttttttttgaaacagagtttcactcttgttgcccatgctggagtccagtggcacaatctcggctcattgcaacctctgcctcccaggttcaagcaattctcctgcctcagcctcctgagtagctgggaagacaggcgtgtaccaccatgcctgactaatttttttttatttttagtagagatggggtttcaccatgttggccaggaatggtctcaaactcccaacctcaggtgatccgcctgcctcagcctcccaaagtgctgggattacaggcgtgagccaccacacctggccttttttttttctttttttttttttgagatgaagtctcgctctgtctggcccaggctgtagtgcagtggcgcgatctcagctcactgtaccctccacctcctgggttcaagcaattctcctgcctcagcctcctgagtagctgggattacaggcacatgccaccacatctggctaattttgtatttttagtataaacgggctttcaccatgttggccaggctggtcttgaactcctgacctcaggtgatccacccaacttggccttccaaagtgctgggattacaggtatgagccaccacgccaagctactcttttcaaatacacatgaagcatttgctaaaatagatgaaatcgtggactataaagcaaatctcaacaaatgtcaaagaaatgaaatcatatagagtatgtttgtatgttttctgactacagtgaattaagtaggaagcaataataaaaagatagcagggggccgggcgcagtggctcacgcctgtaatctcagcactttgggaggctgaggcagaggaatcacaaggtcaagagatcgagatcatcctggccaacatggtgaaaccc

SEQ ID NO: 1654 - DNA, 1216 bp, Homo sapiens
agggccgcaatcagagaacaccgccaggacttccaggacttggtctccaggactgaggtcaactgacgggggcgtggtctgactgtgtgggcgtggccagggaatgaactcacggctctggcttaaggggtgtggtgaacgaaggatggggcgtggctctgtcacgaagggcgtggtcatggagtagaggcccgggctcctgggtgaggccggcaagtttggagcgtggtcagacaataggggcgtggctacggctcgcggagcgcaaccaacgctctagaccagacctgggctcgagaccataactgtttggctttaacagtacgtgggcggccggaatccgggagtccggtgacccgggctgtggtctagcataaaggcggagcccagaagaaggggcggggtatgggagaagcctccccacctgcccccgcaaggcggcatctgctggtcctgctgctgctcctctctaccctggtgatcccctccgctgcagctcctatccatgatgctgacgcccaagagagctccttgggtctcacaggcctccagagcctactccaaggcttcagccgacttttcctgaaaggtaacctgcttcggggcatagacagcttattctctgcccccatggacttccggggcctccctgggaactaccacaaagaggagaaccaggagcaccagctggggaacaacaccctctccagccacctccagatcgacaagaggaccgacaacaagacaggagaggtgctgatctccgagaatgtggtggcatccattcaaccagcggaggggagcttcgagggtgatttgaaggtacccaggatggaggagaaggaggccctggtacccatccagaaggccacggacagcttccacacagaactccatccccgggtggccttctggatcattaagctgccacggcggaggtcccaccaggatgccctggagggcggccactggctcagcgagaagcgacaccgcctgcaggccatccgggatggactccgcaaggggacccacaaggacgtcctagaagaggggaccgagagctcctcccactccaggctgtccccccgaaagacccacttactgtacatcctcaggccctctcggcagctgtaggggtggggaccggggagcacctgcctgtagcccccatcagaccctgccccaagcaccatatggaaataaagttctttcttac

SEQ ID NO: 1655 - protein, 240 aa, Homo sapiens
MGEDPAPARRHLLVLLLLLSTLVIPSAAAPIHDADAQESSLGLTGLQSLLQGFSRLFLKGNLLRGIDSLFSAPMDFRGLPGNYHKEENQEHQLGNNTLSSHLQIDKRTDNKTGEVLISENVVASIQPAEGSFEGDLKVPRMEEKEALVPIQKATDSFHTELHPRVAFWIIKLPRRRSHQDALEGGHWLSEKRHRLQAIRDGLRKGTHKDVLEEGTESSSHSRLSPRKTHLLYILRPSRQL

SEQ ID NO: 1656 - DNA, 28446 bp, Mus musculus
  misc_feature (1)...(28446): n = a, g ,c or t
tggatgcttctttccaaaccattcatttttatagctcagaagagtcatactttggtaagatggatgattattttgtatcttctagtaacatgtaaagcaccttctagaactataaagattatcctgtaaggatgaagcttccaagtgagtaccatcttgattttttcatgttctatcactcaagtacattatctcttcagcaatagggtcttactttaaagttctggggggtaattaatgtagcattggtattacaatatagcaataacattattctataatctttgattggagtctatgtgttctcaattgttagcaactccaaaaaagggtatagctattcctggcacggttttttgttgttgttttgtttttgttgttgtcgtctccttttgttagtttctggtatctcatagggggcactgtcatcctgtcaaaaaggggctccatcataactttgcatgtgtaatcttttatagtggtagatagcttcccatgtgacctttccgaagatctttagtgttattcatgcctccctctcccttcttctaaactgttaagtcacctcaaccccaattttaccttttttgttccatttatccctccaaacctttatattatttttcctttccttgaataaccacaaatgctggcttggatgaggggggtgggaaacacttattcactactaatggagtacaaattggtgcagccactctgaaaatcagtgtagaaggtccctaaaagtctgaaaatagatctatcacctgtttcaccattgctttactgtaataaccagtaaacggaaatagcctagatgtccatccattaatgaataaataatgaaaatgtgacatatttacacaatggattactatttagctgctaagaaaaggaaaattatgaaattcacaggtaagtgaatgaaggtggatgctgagaccaattcctgaaagacaaacatcacatctatcacttgtggatctttgaagtttcagatacttgcattggatttgtaataaatacccatggaggtcaaattattgctaaggaacagtggtgatagtgtggggcttccaggaatggaagatagaaggtagtggtgcttaatgaattttttaatgagtgtctatacaaacattaggtactttgcacaatgtcaaccttctctcagaatttatcaagtagatgttcctgtaccacaaatagacaaccttagcttcaaaatgagcaagcaacatatgccaaaataaataatcagattttaactatcttgacacaggtaatttgttttacccatctttttgtgtttgctggctagcaaggataaggtgttgaataacctgatttttaaataaacacttggattaagagataaatgtcagtaatttagctagaaaaaaaaaagaagagagacctggaattccaaaccagactgtgatctgagaggctgtacccaccactctgttggcctcctctgggaagtgtgcagggctcctttccaaatgaggctccaatgcagggagtgcatatcaagggttgcaaagcatcttgctcagaaaggtgcatctactcttctgtttcaccagtggtttcacgaatctaggagaaatagccactgatttttctctctcagaactttaggtgtgacacataaagccatgtatttttgtttaatggtatgctttctatttgcacatcttcttgtgcctattaaaacaccgcaaatctctgcctgctgtttgcttatgctaaggcttcggccatcagatatgctacttcagcatgctatgtggcatgaagatccaagtttattcacaatataacaaagtagagtttgttttttcgtacagactgaagtttgtttcgttcaagaatgtgagttggtagttatggcttcacacccatgcagggtcagtaccattaaatgatcacattttctgtttatgttgacttctaattatttctcccattaaaaaaaaaatggaaaggttctgttagccaagccagagcacataatgattcccactgttggatgaacactgttggacctgtctcctgaaaaaaaaaaaaaacgctgttatttaccacccacaaactcatcaacagtcctggctctctgcaggatctggattctcagccctctccaacccctcttgtcctctgttcacctccattgggaacatggccacttggagaaagggaaccttcccctcccttagaaacagctgggaatgctgactcagtaccatacattttaacccagagcagagcgtgctcactttgtagtagagtttctatttgtggttaaggaaaagtcccttcacttttgatccttcagatgcctttgatacagtttcagcatcatactaaaccagcagatcagactggctgggcacaaggcaattaatatgattattcctactaatcacatagactttgaaatccacccatggattattaatcttttaatgaataaaataacatatggtggagattcttatgtaagtcttattagaattgaaagccacagtgttagtggcctgaattactagtcatttcaatttgcattactaatgggacgatttagaaaatgcaagaaaggactatatgtaagacttttattaagtttttattctttaatgacctcttgtatgtttcacaactttccttttctctttctctatcacaagccccagatatactccactaaaagaggaatgaatatttaaaagccccaagcaaattaaaattactgctggtgggagatagaagggaacagaggggaaatggaatgttcttatatttaaaaaaaaaaaaaaaaggagacatatacacaggctcttaaagggttggaatttaaatgcaaatccccaagtttgtgcctagttacatttcctctaatataaaaattaataaaagaacatattttcttgtccagatccataagattaagaaaatgaaagagatggcactatcagaccaaatgtttacaaatgtttacgaagtacagtctacatgcatttgatctgtgacatcagtcatttaaggcaggtctttggggtctgagcccaccctcttctgacacaccacctgtcagtcacagtgctggagcctcctaggttcctttcacgctgttccttgtagccagttcctactcactgctgtcatctctgcacttggtagacacttcctcggttgttcaaggatggtttccagggtttctccttaccatccaggcttcaaacaaagaataacttcaaaatgtctgatctcatcaccatgtttacagtagcacctctaagtgattctatgtgtattcacctgagaccaggacaatgtgtatttatctaactctctattatataactaccagcaggttaacatagtgacacaaagagctaaagaacctttacccatgtatcctctgtatcatacaacacaaggagttcttacttttctttaactaaaacattaatttatagcctttttgctgcatcgatgtataatgtttccattcatctccaagcttacttctaactagcaagtatttctatcttgatcctgctatcatggtgtaggggtgtaaaacagtgttgaggctggaaagataaattggtagttaagagaggccattcaaacatgacaaccagacttcagattccagagtcaatgaagatgctgagtggatgttgtatctgcctgcaattagaagaccagttctcaacaagtaggtggtgaccgtctgagggcactgaaggactctttcataggggtcacctaagaccatcagaaaacacaaatatttacattaggattcattaacagtagcaaaatcacagttatgaagtaacaaggaaaataattttatgcttgagcagtgggggtggaccacaacatgaggaactgtattaaagactagcagcattgggaaggttaagaaccactaccccggtgcccttgactgcagagacagaagatccctaatgacagctggccagtgaaaccaaatctgggaactccaaatttgattgagggatcctatctcattgaataaggtgaaagcaactaacatgagattccccataccaactgcaggtctccatatgtacacccccccccccaacacacacacacaaactcacaccacatacataaagaggaaaaatagcattgttatatttcattaaattactgtacatattaaaataagcttttgtgcctactttgacacctatgcttaattcctccaaattgtttaaaaggctgtaaagtttcaaccatggtcagatttaagctttgactaatgaatgagaatttaaaaattctcaatattttcttttgtgttcaccaaaaaatgtgtaagagactatccagtaattctattttttaacacttgatcttcaaggaactgtgaatcaatcatccctaaattttcagttaccataatgtcactgtataataacacaaggagacctgctgccacagtcttttggggacttgattgtgtagaaatacatttccttacttagtcaagattaaacaaaaaacttctagataaagagactactaaaagacatctagaaaaaccttttttgtttagctttctgttaaatatcagtttaacacttgcattaaaaaacacaattacacagcctttttatattatgggtgtcattcattcttcaatcatactgattattaaaaatcaatgcaataaatggtcactctgtatagatgccagaaattatcaaagagactaccaagaaattatcagaccaaataaactccttaaattgaggaacattaagtgtgaacaagtgcaaaaagggagagaaatctgaagtgaatatgaagtcttttctccttctcctttctctaaggcccctgccagggttagggctatgtttttgtttgcttgtttctttatttttttggctaaagtgatatttaccaaatttgtgaattcattacatattaattatataaattgtaaaattacaaaattgctcatatataatgagcacttacattgaatccaatcaagtctgttttatgaactcacaagtaaatgaggagagtagataattgacaaaacacaataggttactttcacatagtttaagtagatgagagttagacttccagttgaacattagaaatggaataaaggcagatccctgaagcttgctgtgaattttcacacaagagttcttcatactcagttgatttgatgcataataaacaccgcgagtcacaggctgaactttctcagctagatagtcagaaaacttggtcagatatcactcaagaacacttggcatcagacactggagacagtttttaaatgatgcattaatctactatttccacacagttttcataagattaccatcttataggataataggagggcttacagaggaaagggaagggagaaattttataattatattataatctcaaaaaattttaagttcaaaacaaaacaaaataaaataaaaaacgttttaaaatagttattacaatgtatctctttcttatttataacttaagtagtactaattttgcatgaatgtcaaaagatcccaatttgaattcctgtaaattgtttccattttctcactctcatctagccccctttatattagcatttacctccagagagagttagcaggaacaaagatatatatttcaatccctgatctcagctattctttgctccctaattttcagttttcttcacacctagcttagaaattaaaaaatgaatgatcatgataacatgtacttgtagaggaattttccactaattaattggttggctaataaagacaacaagaagccaatcgctgggtgaataggagaggtgggccttctgggtcagagagaggaagaaatggccattttttacagtgaggtaggaatgagaccaggaactgtttgacctggtggcgacctctgccaccggaagatttccaacatagaatagttgagtttaggataatagattccgtgcccagtggttgtgtcatctgttgattttaaattaagattgtttggtgttttccattcacgggtgactcgggtgggccagagggaaagagcatagcaggggcataattccgccaggctttggaacaggaagattcggctaaggactgaaaacgagcggagaggtaaccaaagcagagtgcaggctggtgacagcgttcccacagctgaccacagggttttggcctggcaagagagccatctcagagctctggagaggcagagccagcatttgtgggggaggaattggttaggagaaacatacagtcttggtctcaggctacgcactgggctaggaacagacagagaaacaatatttccaccaatgttggaaagccagatttagcgtggagtcattttgtaaaactacatgctatatatacttccataggttgctgaacagttgccatggtgaattctattattttatgagaaaatgtgaagtgtctcagaatgcttctccctttctacaccttaactagctaccaccagagaatcaatcccatgtacaccaacaaacactccaaagtaaactctgtttctggttatgtcatactgtaccacattttgataagcagactcccttttcctctcaaccttgttctaatccttcaccttcaagctctctccccctaagtagtaacttcttattctctcttcccactatcaagaactcaaactcccagccgggcagtggtggtacacgcctttaatcccagcacttgggaggcagaggcaggtgaatttctgagttcaaggccagcctggtctacagagtgagtcccaggacagccagggctacacagagaaaccctgtctcaaaaaaaaaacaaaaaacaaaacaaacaacaaacaaaaacaaaacaaaaaacaaacaaacaaaagaactcaaaatcccaacttcccaaatccctttcttgtccaagttattctgctggttaccatattcatttgattacagcaccttggtactgtgggaacatgcatccaacccttaccataccattcttagcttaatttgaagttactatgagcaccttacctagaatatcccatcaactatctcatgatcttcaggtctgctaaggtgttagggaaaaaccatttcaatagactgcaatacccggggatccatcccataatcagcctccaaatgctgacaccattgcatgcaccagcaagattttgctgaaaggaccctgatatagctgtctcttgtgaagctatgtcagggcctggcaaacacagaagtggatgctcacagtcagctattggatggaacacagggcccccaatggaggagctagagaaagtacctaaggaactaaaggggtctacaaccctataggtggaacaacaatatgaactaaccagtacccccagagctcgtgtctctagctgcatatgtagcagaagatggcctagttagttggccatcattgggaagagaggccccttggtctttcaaactttatatgcctcagtacaggggaacgccagggccaagaagtgggagtgggtgggtagaggagtggggggagggtctgggggacttttgggatagcactggaaatgtaaatgaagaaaatatacctaaaaaaagaaaagaaaagaaatcacaacatgtcatttaccatatagaaacctgtcttgtctacagaaatcttggcgtgtcatggtccacaaaaggtttcatactgtaaatgcaccttatgcctccagtcttcttgatagtctgatttgttcctgaaacatacacaaccttgtatcaagctcattccagtctacttgttaactggagcaattgtggtgttacctcttcctcctctagcctgacatcgtcatgtatgtgctgataaagtccaactacttctaaaacaaagtggaaagtcttctacgacacatccctttcctctttagtgtcacagtctacaatgtccatatacaatggcagtagaaagatattatttgacaaatataatatataagggaaaataaacttaatagaatggggcaaaagggcaggagcatgacaaactaaaattctatttttttttccttgtcttagactcacagggtttcatggctggaagagttcttacaggcaatctagaccaaagttttctgtggtttccatataaaaagtaaaaggccttaagatgaagtttgggaaatttgtatctagttgtgtaatactgactataatttcagtgatccttatacagcattcatgaaaccattcactacagtattgacccttaaaaacaggatgccagaatctgcacttcagaattgtaatgtctggcatttcccatggctatggccattgaatctttcccaaagaaacatatttgtgctcaaacattgctgcccatatcgtaaattctctgattacaaaccagtaaatctccaccaaaaagctgggacaactgaaccttccttgctcctccgaaaacttcgtgcataatgaaaatatgcaggaagacttgttattatcacaacttgacttgcatcagttcactggggaaaggcttagagtctcggggatttgagcaaggtcttagcatatcctaccatgtcacaggaagttgttgccaatcattagacaaactcagacctgactcagaagtttctgaacatccaaatccaatgctttaaatgaaacatcttaaggaatttgaggctctaaatgtgtaaaacacattaatattaataactaatctatttaaagtagcttcataattcataaaggcttgaggtatataaactttcaaaatcacattttccttaaaacacttaagtggtaaggacatatcagtttggacccttttcattgaacctggaatcactgcttgactgacttggaagccattagtttctcaagtatgatctatttttccatagatgggttttgtgaaaatctttcacaggtttcacttggacttcgagattctgacttcaattctgatggattctgaacacttgcggttctcctataccttttcttttgagggtatttccctgcttaaaataggttctcatttttcccaagcactcccccacccctagtcccctgtcataaaaaatgaccttccttggaaaggagtttctggtacaaatccctcaggtcccataatggcaaaccctcctcacccactttataggactgccccaccctacagaagaacatgcacaggaaaagcagccctcccttcccccacacatttcctcagtttatttatgaaacatcttggaatgagagcgagctgcttgtggttcctgtggcttattcagggatggtttcctgcaggccagggaagcgggtcaactgaatgacctctatggagctaactcctataccccaacaggaaggatctttgttatgggtatcatttcagactgtgcctggagggctttgttgttccaatgaagagcttaataaccaattatcactgtgattacagactaatattatacttgaaatatgaaataattcttcccggctcatgttttgaatacttgatccctagctagtaggtgataatatctgggggagagatggagcccttaggtgtggccttgctggaggagaaaaattattaatatgggacttttgaagtttatttcccagaccatggttctcctcctgttctctgcttcttggtgtggcatcgtaagactgcagggctttgtttctgcaataaagagcttaattatcagacatcattgcaaatacagattaatagtgtccatgtctactgatgtttatacctttctctgtcaataaaagatgtcagaaatatgccaagatacctttagatacctgtgtgtcaatgttggcttctcaacggaagatggttgacttcctagaaagtcctatacaggattagcttatattttaatacagaatccattgggaaagacgatacctttaaacacaggctacatgcagcatgctccttacttggttcagtcaggtaacacataatcaattcccataaccaagttaactgagaggagttccagtaaatgatgcctctagtctttgtttgcgtgtgttcagacttgtcccggagcactcttacatcatgcatttatgacttcggaagccaggagtgtgaggacagtgactcttccccatttacttgaatgagttaaattaatggggctgggggcacaaaaactctagggcttctctcccaaaaagccaaagtagtaaacacaaattcatataaacttactggtaagacttagatgcaaagttttacactgtatcaaatttaatggtgagaagaaatatttcagaaaagcactgggcagtggcagtatgctaatgtagtttccgaattagtttgatttggattaaagagtaaagtattctcttaggtcaaagttgaaatagatgttccagacccaaggtctttgttcaacatcttcactcaagtgcatgttattacacttgctgctgaagtcacagacatgcttatcgtctgtgacacacacaaaatcaagccaattttaccagtttcattgcaataaaaaaattaaaattaaaaaaataaaaaataataaaataaaacaggggttgagagatggctcagaggttaagaacactgtctgctcttccagagttcctgcgttcaattcacagcaactatgtagtgtgttaatccatctatactgcgatctaatgccctcttctgcattcaggtggctgctagagcattaatatacataaaataaataaacataccttaaaaaaccccacaaaattttcaaaccctattttcctgcatgctgattcagtaattctattttactgagatttttaaatgaatcatttgaatgaaatatattttgaatgttcaaaggtgcaaagatatgagatttcaaattaaatattacatatggttaaggaaaattctggacttaaaaaaaaagtaggaaaaataatcttatctcatttgcccactatcatcaagtcgaaaggtaattaaagtaaaatacacacagagagggaaatgtcattgaatcttatgtccacagtctaacctctctttttgtctctctgctttgcctctgcagtgcatcctaatgtcagtcaaggctgccaaggaggctgtgcaacgtgttcagattacaatggctgtttgtcatgtaagcccagactgttttttgttctggaaaggattggcatgaagcagataggagtgtgtctctcttcgtgtccaagtggatattacggaactcgatatccagatataaataaatgtacaagtaagtagccacacccctctatagttctcattttcacctcatcccgagagatgtctcctgatgaaaaaagctcctaagaaacctaaaatactcaaaaaaaaagtactagttacataatattaggaaaagacacacatagacttagccctcaggacaggaacattttcactactaacttagaaacatcactcaagttttgtttttgtttgtttgtttgtgttgggttaaacaacctaaatccaggaacaggattattcctaactggccctacagaaaatgactacaggtatcagaaccaatcgagttcccattacatataaatatccaagcattcagtaaccggaagaattatttcagctattttggcctctataagtttccagtatagcaatgaaaatatttgcaggttggaaatcaagtttatgaggactgtcatcctggcctcaaaattccagcctcagcaatggaaaccaagtggcatttgaaagattcaaatgaggaaatatcccttctctccaaatatcatgtgtccttccaccagtggctccttccctgcttccctgctgcctacctcagagtgtcccaggtcagaatctgtctggacaattttgttcctcactggctcttctggaacttctgaagctgcttgctctcccattcaagattctaaaggcatccctttctcagtgaggtagtgtaaggtccactcctccaaaagaactggcctcggccatttgtcagtcatctgtccgttctgtttttcctacatttatctgtgctattgtgattcttgtttcccagaacacttacaagtccaaagccaactgtcctttagctttcctgtgtgactgattgattcactgctagatttgagcctcagttacagcacttgtgaataagagtcattatagtgaccactgcattggtttaagctaacattttggtaacaatgttgcaaaatacccataacaatcatggttcatggtaattactacataggagtcagttgctgaaattgtttactctgtctcctactagaaggtgagctttgtgaacactgggcatcaaccccatgaatggggtcaactacagtttttgacatctagtagacagttaaatattgagtgaacaaataatccttgagaagagtataaatgaattatttcagtgtatgttattcaaataacacagcattactatcacttaatgcaaaatgctacttggacaaatggacaggttgagagcttcttatatgaaacaccaggaaacaggggtgattcagggggttttggatttgagaatggttgtgtagacattactggctaaatatccctaacctgaacacccaaaatctataacattttttttaacatgatgtcagtcaccaaagtgtctcagattttagaaactctgtatttaaatgctggcaatcaaggggccccagcatatgttacaaaggtatttgcgtgctacaatactataatttttaaaggatgcatatcaatgagatggctttgggggagccctcaattcagtctagcaaaataacactgaacactgaagttgatgccaaagttgcatgtacagtaggaagatgatccagcagtagtttggagaacatgacagagtgacaattatttttctgtatttttcctttcagaatgcaaagttgactgtgatacctgtttcaacaaaaatttctgcacaaagtgtaaaagtggattttacttacaccttggaaagtgccttgacagttgcccagaagggttagaagccaacaatcatactatggaatgtgtcagtattggtaaggaaggactctaagatttataatgggtgagaaacacatcagatgacaatggcaatcttccacaagatcctgagaggctatatctaataggccctatccatctttgtttataagatactattccaaacctatgttcacatagctatatcctgcatgtattgtgggtagtttaagagtgttctgctacttgttaaggatggctcataattgtttcgaactactctgatcatcaaatatttcagagaaacaaaggaaaagaggagggagagaaggaaggaaatgtgtgagtgggacaaacttagctgatttctactttaaaacaagacttaaaaaaaaaaaaaccctaaatttgataacaacccataatgaaattattttccatatggtggtattttttttaatattgcccaccaatgttgctgtgtctaagtattaaacacagagaagagagaaaattttggactccttcaaactgacagaatgagacagtccaaactttgattaattataggcctgttttctggagaggaggttcctcagacaagttgtctgtctaaacgacaaatcatggttgggctatgttttccctcttttaagtgttacacagctactagagctatgggtttgatgcagttgtggaacagaggctaacccaaatgggaaaacagaaaaagagaactccaagtcccttgggcagtggctgcagaaacctttgatgctgtcctatgctggtgtgtgtacacagagcctcctgattcaatacaagatagtttccaggagtgccccaggctcccacagtgtgcttctgttataatttaaggtgttggacaaataatttaagttggtggctccaccatttcaggataaatgcaacttttatgtctatacattcttttttggcagaaggaaaaccataggtgatatttaaaagttagccgcagaaatgctgggaaccagtaatctcaaatttatcttgactctttttgtttcaaacttccctaatcatgaaaaacacagaaaaacaacttaggaaaggggtaaagttgtccatgaaagttcttctggtctaatcatccaaagggctgatgattcgagataataagttccaaacagtggacaaaatgggaaacactccactgaaatattaaagtgcagataccagaaacttgtaggatttctttactgaggagaaaggacagatatttaagttttgttagttgttaaaggtgtaacattcggtctttaaaagctaaatgctctttaatagtttcttatcacagagtgtttaacatttggcactgtgggataagtcttcaaagaaaattgggttttatatccccaaagttaccaattctatttcttaccataaattttaaatgatgattaaacaattaaaatatcactagctgcccaatggccatttattgaacaaatgacctaggacacagttgtattgtagatgggcaatttcatcaggactggctcctttagcctgttccctaagggaagtacctatcttggtagtcagtccttatgcatagcatgtgctggcttgccccagactatcagggaaaataatggcacgcttcactacacaaaggacaatcaaagtatggaggttcaggacccagaaagctgagatgtggagcgcaaaacacacgataaattccagtgcttagcttaggaccttatttagagctcttcactgcttaccagtagtgtatctttcccctgcccagggctgttagttaagttttgtttctacttagaagataaactgagtaaatagatttcaaacaaaaaactattgcccatgtatagaggtggcatgaaagatcattgtaacaatgtatccagtcctcatggtttgcaaatcaatttagcctacatttctacctttataagacggcatattgtttccactctggatttgagatatttgcttccccctgcagtgtagttctgtgttcctcattgttcctcttggaagtcacagagggggtcaatatatcactgtaaacacagagactgggagctcataacctagctatatctcctattggacatgcctccagtggctgaacccaagttcacccattcccacctctcacccccccacacacacacacccacacttttactgtgaatttcactacatctcagatgacaatgaatcacagactgactctttctagggtctagggctcattaatttttctcaaatacttagttcattgggcagaagaaggaaggaaggaaggaaggaaggaaggaaggaaggaaggaaggaaggaaggaaggaaggaaggaaggaagacagcatctgaggttaagatccttcttaagcatttttaacaaagttatatcccagttttaaattgttcatgtaattgaaacttaaattgaacttaaaccactcttttagttatatctatcatttttctaacctttccattttatgaaagtattatatttgctacattatcagccttttaaggtatttctgaaggaaaaaatatcttcctttaatatgggttttaactatctaatctcattagttatatttttttccttcaatagaattatctaagattaaatcagaatttcatcttaataaccaatcattttctgatttttagatcagtaactacctatgtttcaatttttcaattctggtttcataaagtgaaagtatgtatttgattttatcacctttgttgtgaaagaccaacaatattttggcttccaaattaaataatgctttcttttctaatttgtcctcttaattgtagtgataaatacagacacaaagttaacatacagactaatatttctctttctatttgccttcttggaggctttttcatctatattactatttgatgattaacttggagaaagggtgttaggaggtaaggttcataaaaggcaaaatgttatactattaaatagtgtacttgctttatttgctgaccgaatcacaatggtatagctaaaggtggagtttattttgaagatgattcaatagagctcatttaagtttactgaaacaaattcatttttatatgactctgtgctgcacttgggtgcctgcaagtgataaaaatgcctataaaaatgaaggacattttaatcctctagatttaaaataaaaatattaattaaaaattactttcttatatctagaggtttaattttaagtctctagatcacttaggttattgttcttaaggttgtcatcagaggtagccttcttgtacaataacaccccactaagttagaagacactgcaagaggttaccagaaacatgtttctgtggagacaagctgtactatctgaaaggtttacaattggaagccatttctattgttgtaagttatggtgtttcatggtcataaaaacaggaacagcattttaaaaaccagccaggagagcacagccctgtactactagaaatcaggagacatagacatgaggatcatgagtttgactctaggctggactgcataaagacacattgttggaaggagggaaggaaggaaggaaggaaagaaggaaggaagggagggagggagggagggaggcatgaaaagttgacttaacttttttaaatgccatagagctagttaaaagtccatttgacgtttaaaaacagatgtatcatctcttttacctctgctagaaatgaatatattactatagtcaaaagaatactctggaacaaagatcaaacaatttaacaaaacttttctcaaaggatggaaataccctgagtgaaaggatattgctaatattttatacattcaattttttnnnnnnnnnnnnnnnnnnnnaaaatagcacttttggaatgtcattaaaagtacaaacatctgctacaaaaacccaggaaaagtattaatgaaaagcagagaaactaaactcacacagaggaaacaaatcttcacaacagcttcagaagggcacaccctgccctttaagcaccacgcaaggacatccagaccaaacgcaagttattagctgtcactgaccagaagttcactaaagttagagatgctgctgtgaattaactgagtaataaataacgtttaggtattccgcagcatgggaaacagaaagggcactgactctaggacaaggacctggatagtcctttctgcctgccatcctctagcacagatgctctcaaaccaaatgatgttaccaagtctgcacataacatctctgcattaaggcggcacatctgctccaagctagaaatgtcatcagaaggctagggtggggtccagaatcctgtgctttatcaggcccttcaattaattctgagatctgcaaacatttaattatctagtcaacaatccctcgagctctagtaagaatcactcacttcttacagcagtgttaggaaatttccaaaacgttcattaggtgtgcctgagttaaccaggttcaccgcagaattccaatccagtgagaagaaactgtcccaacagcatatgcactaaaaagcgttctatgtctgccccttatttatgttatcttgcccaactatgataagcagaagctattctagaaacatagatgtgttgaagggatatgttgtggttgtttgtttgtttgcttgtttcactgataatcctgcctgtgctttggttgcagtacactgtgaggccagtgaatggagtccatggagtccatgtatgaagaaaggaaaaacatgtggcttcaaaagggggactgaaacacgggtccgagatatactacagcatccttcagccaagggtaacctgtgccccccaaccagcgagacaagaacttgtatagtacaaagaaagaagtgttcaaagggagagcgaggtacagactcactaacacaacatgcttctttgaatcctcccaatctgatccatatttcactttatatcttatggaatagttggccatatttctaatgccagaagctctaaaatgggtaggaaaagaacactatggacctaagttacagtttatagatctgatatgggttttttctttttagtaaggaacctgacctcagctctttagtgtgatagtgtgataaatgaagcccaaatcaagagactactataagtttttaggcttgattttattttatttttttttgtctgtgatctgccttgttaatgcccaggaacttttgggaagtttcataaacacaaggtgaacatcatctgttgtgagaccataacaaagggacatacccctaccacaggagacattctctacacaattgcttacaaattaaaatggtgcaaatgtttctaagtttcacggtttgaagtaaagggtcaagaccactggggacattatgtctccatgttgctgttctaggcttttgtaacaggttgcataaactattagagcaatattatttatttcaacatttgttaaaatcctgtaagcaccaaggagaaacttaccactgaagatagtgcatgaggtgaaataaatttcatgtagaactacagttgctgatttttaaatgatcatccccatatttcttaatcatgtcctcagtaccactgcctacaaatatgttgtatatctttaactaattatagataattttctagtgagcctatgaatggccgtctccacaagctaattgtcatttgacaggagttgaatacatctgcagatgaacttccttcgcttatgtcagttagtctttcactaattcattcattcaacctacttttattaaactcttacttctgtggccacatatcatgtgaattcctaaagattcatagctaagtagaatcctctctgagagtactatgaagttaaacccagagtccaaagggaagctgagatgtttgaacagatgttcataaacaataccacgtagtaaagtagtttcttagaatcacagaagaggacacgctaaacatgaacattgtttatagaaaaagtaattttgatcacctgagtttttacaaaatattttttatcatatcaatagaattaattgcccaccatgagactgtatggaatcttccattaccactgaaactcagaactagggtactaaaatttttggaaatatgagttatattaaagagaatatctaacttttgtaaatctgtaagaagttttggttaaaacttcgtttcagaaatgcaagttggctagtgaaaacggtctttttagcatttgttatcaattaatttaaaagtcttagattttgaaagttggcattggaagtcaactgcttgagtactctattggtatgctcccatagccacagagttatttctgtttactaaagatcttgaaatttaatgagctacatctggccttcaccatgtttgtttctataaaatctacagcattaacttgtattaagtatattttccttcaagaatataaatgaaatgaagcttattccataaactaaattatattatattttctcttttatttgagaatatgcccttataatatacttctcactgcacttgccataaaattgatgtcataaatgccacttcttaggactagcagctagaagagaagttatgccataaagttgtttgagtatcaacctgtatctgaagtgtgaactgaaatttttgtttctgatctttgttcctcccttccaaggataccacatcattttacattcacaaaattagatttgtggaaatataacagtataaatgttttataatttctcaaatttgataatacatgtactagcaggaattgttgatttcctggaataacattccttgccccactccacttttccttactcttcatttttctgtcaatgagcctgtttcattttttaaggtaggttggaaatataaggaagaaatagaatcatgctcctaattcatcactccttaagacttttcataaattcttttaatgtctacttattgaatatattaccttaacaggggttgggggagggactgtgtgagagagggaccaggataggggacagcaattggaatataaagtggataaataagttaagttaaacagtaagaagtcaaagaaacatatagctatgacctgtgtctgtgctttccataaactatacagggcatgggaacattacccaacttttcacttagccttagatacacagctataaaatacgtgtggtataccataaagtactttgaaatgtaaatgctaagaagaatcaacacacttagaaaggctaccaacaggctaagttgactagaagacataggagttagtatatctagattagctagtcattttttatctcagaatcataaacataagaaaccttcaggcagtttaagagataagaactataaaatgataagcacaagatctatccaccagcatatctatttactgcctaattgctctgatgtcagggcttagagatgtgtaaaacaggaagagtcccttaattgtataccttcaccactgaaagatgggtgaagcaaatggcctagtgatttttaaatgcatcttcaaatcttgatttgaaactacgtctgtgattttcctgggaggatcacagtggacagaagtaggacactcgtgtttggaacaggtgcaggacttgctttcaggatttttttcctgctgagttctaactgccaaaggcggaagctccagggaagaacgatagtccctgacgttcccctacatcgagccttgggctgattggttagaacgtcttggcagtgagcttctggaaactgcttgtctctcccactcaaaccaggatactaaaactcatgctgttgttccatactattacaggggtgctagagatatgaatccgggattggtagttatgtggcagacttcatcagctggtacatctctttactgccttcttaaatgtgtttaaaatagcacccactgctatgttatgtgagggagtgctaactgtactacaaatattcctcagcccctaatcaatgatcttgcccttgtttagatactatgagagatgtttctataaatttacactgcataacaagtaacttcaaaaccgagggtaaaacaacagccatccgtttaaggatctgtgactgggtagtttatacagagatccattcagcaagtctgatcttagctgggctccttcatgtgtctcacccatgttccttcaggatggctgagaactgaggctaatgggctgtgttcaaagtcaagaaggtacatcaagtccaagagagaaaggcaaagtaggtttacctgaggagatacttagaactggcaagcttatccacacccttcttttatcttgtactagtcacaaggtcatttctgactctgaaggtgagaaataagttgtacccattgcctcaggcaaccatgttactttctatggtgccacccaagcacagtcagaaggggaggaaggtgagtgttattgccatgcagagatctttttattgtttgccgtttgatgaatatggtcacttagtctttaccaatctctccttgtggtgctgtctcttcctctataaagcacagtacagtgtggcaagtagttttgtctactttgctttgtgctcccggtgagttgcagacacatacctgcccaagagctagctcagccacagatcacacacacacatacattcactcatttttaaactgccttattggctctgtggctgggctttcctaagccttctgcggctagcatgcccttacctttttcctagctcaacatctttaactctgctctcaacttaacggcccagttatcttctatgaagtccattggccttgctgcccaagacaccatgcccttccatgggtctttttccatttccacctacattttggaagatctaccctacagttctgagtctgttcctactctctctctctctcaagtatctcatctcctcttcctgcccattcctgctggaacctggaagtcctgcctcttgctttccaccattggccactggcgtctttattgatagatcaaaaaccatttgggggcaaggaccttcagtgtcagtaaacactgattcccaattaaatggaagcatcagaaccactcctctttagtagagatatggagtatgtaacttctattgcaccttccatgtataaaatgaagtgtattatgttcccattgcttccaaaactggcaaaactacttaaagaacttttgctgacagtttgatatcaaaactctggcagagagagagaaaggcaaagtaggtttacagagagagagagagagagagagagagagagagagagttgaatactcatctctctctctcctttttatttagtctaagaccgtaccccatagaatggtcttgctctcacttagcctgcctcttcttacatcaactaatctaatatagaaactttctcatagatatgcctagaggtttgtgtcaatggtgtgattctaaattacaccaagttgaaagtaagagttattcatcacaaggagactacaacaaaagattaaaagccaagccaaggagcttgggagatagctcagccattaaaagcacttactgcttttgcatatgacacagttttgatccctagcacccacaggctgacttacaaccatccataactgcagccctcattgatttgacaccctcttctgacctctacaggcaccacacacacatgtggtacacatacatacatggatgcaaacaacccattagtgtacaatcatgaagtaagtaatatttgtttgtaaaaagctagaccaagataaactcatgtattacaactggatggaacacagggccccaaaggaggagctagagaaagtaccgaaggagctgaaggcatctgctaccctataggaaggacaacaatatgaactaacaagtagccccagagctcctgtctctagttgcatatgtagcagaagatggcctaatcagccatcattgggaagagaagccccttggtcttgcaaactttatatgccctagtacaggggaacgccagggccaagaagtgggagtgagtgggtaggagagcagggaggggggaaggtatagggaactttcgggatagcatttgaaatgtaaatgaaggaaacacctaataaagaattggaaaaaatatttacttaaatatctctttgtaataggtgttctaatgtttgagaaattaaaaaaaaagatgccccctttaccagttttttcatattcttggcattaatgtcatacttaatgttcctgaaaattgtgatcaccctcttcagctttcttgtagcaaaaacctatgttgagggttttcattttcataataagaacactagtagctgcagttttcattaaagtttactaacttacttacaaaagcatctactttttctggcaaaatataaaatagaactgcctatattttgttctagcttcaaggcaaatatatggtatttttcctgtgaccaccatatcaatacactgatacatattcttcaaatggctgagtagggttaaaggtacagcttgtggctgtggaacagagtttgaattaatagagcctttggagaaatgacctcaagacctttggcttcactcatagcctgctctggccaactacgattcctgccaactagtagggttccctagagagagactccaagagcatcagcataaatctaaattctgaacccccaaatatagtttccaaaaaggtctttcttgttctttgctaattacaaaataaacaattctcagcaaaaagacacttccttctttcatggtactgtctagctccctgcacccctaccactctttaaaactgctgctgttgctgaggccctttggcacaggagacaaacccatgtttgcagacacaaaaaggatttttaagtctccctctttaccccagcaacttcatagaagccttacagagaaactctgtgtatgcctgtgtctgacagaatggatgacacaccttcttaagcctcccaagaggtgggagggggcagatctaactagaaacagttgatctctgtagcatcattaaagaaaaatactctcaatcttggttatatcatgcatctgtatgagccggttaccagattgaaaaattttacaccagtattcattgggacataggcgctaaaaataacagatctaggggctaaagagatggttcagtggttaagggcattgtctgctcttcaagacagaattagacccttcctgagtttatttccaagccactatatggtgtctcacaaccatctataccgggatctcatgtgctcttctggcatgcaggtatacatgcagatagagtactcttacataaaataaatgaatctttttattttatacaaaaaaaaaaaatgacagttctaaaattatcttaaggggaaaaaaaagctttcagcataggattttttaaattgcattctttcttcattgtttcaattcatcttctgtctcttttcctatttactggtttgttttccattgctgtgaatctttctaaaatttagaagaaatttggctctaaacagattcagtccagggtccatatgtaaatgtcccaatttaccctaatttccctgtccacgtggcttatttcatggaggaatttagttgatcggtttgaatcacatgtccattccttgaagtaatcactccagcaggtatttacaatattttgatttttctacctttcattggtcacattcctacaattaaaactgaatgccattgtgaattgtttgacttacaaataaggatgtacgtgtaattgatccagctcaatacatgcatacacaaatatcaagtgctcaaaaattattcaatgtaaaaacatattctttcaccagatactttccagccaatatgtataaaagcaatttaaataatgaagcctaagagcctaagcaagttttttttttttttgtaattttgacccgatgtgcatgtctagcataatgctaataatatcttcatttaaccaatttttccagtttctgggtttttaggaacatttttatgggattaaactgactttaactgaatccactactccttgaatggtttctgggacagatttgcatataccatgcaaggacagtcattcccatttctagctgcttaaggttctgtgtggaacacaccagtgtgggtgatgacattctgcttaattactcaccatgccactggaactttaagatgaactcaaacttaattactgaactcctgtgtttatgctatacatataccactgagccataactttagcctctatgaggccaggctgctaaatctggaaaatatgtcttatggggagttgttttgtttgtttgttgtttctgttagaggagtctcttttcccccctgcatttagaaagaattggataatcagaagagttgctcaacaaagagtaattatagtccatgagtaaggacagatatgtacatgaacacatgaggggtggttttacttttgcaacaagagcaattggatatttgcaagcacatttatttcttactgtggcataatatctgaattcaggagagacgataatacactaaattcatacttgagccatatgtgtgtgtgtgtgtgtgtgtgtgtgtgtgtgagagagagagagagagagagagagatagagagagagagagagagagcatgcacacatgtgtgcacatacaattgttcatttcaaaagtaaagcaggatataggaagtgtgcctttagtgacatggttagtgggtaaagggtcttgccaggaaggctaatgatatgagctggatcctggggacccacacagtagagggacagaaccaagctatatagactgtccttagactctgcatcacacacacattcacacacacacacatacacacactaaataaaatgtaatgattaaagatatcacacacaattaaaacacaaaagcattaccctaattaacataaacaatcacctagttttccataatataatcattataattaatagataactatttttatgaaatgcccacatatacagagaaatatccctcagggtaatgaatatactttgtaagtgtcagatacattgtctagttgttctctgatttatatcacatactgaggacttatgcttcaatttctttccctcgaaattacaacttagtttactaaagtagttcaatagcagagccctagtagatgaaacatttgtccagcttctcaagtcctattctgaaatgtgtaagaaaaggaagtttatatctatctaaaatattttagtgtgcgtgtgtgtgtgtgagggggttgtggtgtgatgtgtgtatgtgactatcggtgtgactctcagaggtccacgttcagcagtcagttctccatttcctctaagttccagggattgactgaggttgacaggctcaccaggcaagcacttgaacctaagtcttctcaccagctaaagagtcttccttctacttacctgttctacccttttccagctaaagagtcttcattctacttacctgttctacccttttccagctacttccaaccctggggtaacctttttatgttgctcctcttgtcttattttcctacccatgcgtatttacctagttaactaatagacacatatatgaacctaattaattaattatctaattaattaattaatatatacatatatcctgagacaggaccttcccacattcatgtgtaaatgacaaaggtcaatgccagcatgaccctgaattcacagtctgttttttctcttcttccaaaggctgggttacaaatatgcatcactacatccagctgttgcaattttttccttttattaaacatggctttttttcatacataatatatcctaattagtttcccctccctctactcttcacaattcaccacccaccctccttcccatgcagatctactcactttctgtctctcattaacaaacaagtaggcttctaaataatttaataaatacaatactataatatataacaatattaaagtaacacattggaatagggcaagataaacaaacagaaagaaaagagcacaatacaaggtacagaaaacagatacagaagtgaagaccaactcatttgcaaactcagggatcccataaaaacactacactgtaagtcacaatgtatacacagggagtctgtagagtaaaaatagagaaaaacataaatatgttaaaatataagataataaaaaaaactctggcatataaggaatctttttttttaatattttatttatttattaatttattaatttatttgtttatttattaaatgtaaatacactgtggctgtcttcagaaactccagaagagagcatcagattttgtcacggatggttgtgtgcagggggctggtgagatggctcagcggttaagagcgccgactgctcttccaaaggtactgagttcaagtcccagtcaaccacatggtggcatataaggaatcttaaaggactccactgagtttgttttctgtggtcattttctggtaggcatgttacctacttctaaaagtagtttgtttcttccttggagaagactaaattttcatttactagtggttatcaatgggagattgcttcttggttaggcgtggggtcatgtgtccgcttctcctttcagctctagcacttcacagttacttgagccctaggggagggatttaatggaggtatcctacttagggctcagtattccatattgtctggctgtgggtctttgtatttgttcctaactgttgcaggaggaaacttctctgataatggctgaggaaagcactgacctatgagtgtagtaaagtgtaattaggattcattttactgctatgtgctttagtagcatagtcatatttggttttaccctcgttccctgggctatctattcataagttcttggtcatctaagcagtaccttgtattagttccatatcatggagtatgcttaaaatcagatattggttggatactcccataaggactgtgccaccattgcagcagcaaatcttgcagacaggataccactgtagatcaaagggtttataggtgggttggtgtttacctttctcctcagtagtgtgcagagtttcttctatacattaacatatagtagtaaaatctctatatagacaccagcttgacttcatcatgttcaatgtgttgtgtaggtgttgtcttcaaaaatgggcctttgctgtcagtttgtggagagcaatctgtaggtttgataacaggcaaaggtgtttgggttcccatgggatccctttgacctataattcagttagatgtgatccat

SEQ ID NO: 1657 - DNA, 702 bp, Mus musculus
atgcagcatgctccttacttggttcagtcagtgcatcctaatgtcagtcaaggctgccaaggaggctgtgcaacgtgttcagattacaatggctgtttgtcatgtaagcccagactgttttttgttctggaaaggattggcatgaagcagataggagtgtgtctctcttcgtgtccaagtggatattacggaactcgatatccagatataaataaatgtacaaaatgcaaagttgactgtgatacctgtttcaacaaaaatttctgcacaaagtgtaaaagtggattttacttacaccttggaaagtgccttgacagttgcccagaagggttagaagccaacaatcatactatggaatgtgtcagtattgtacactgtgaggccagtgaatggagtccatggagtccatgtatgaagaaaggaaaaacatgtggcttcaaaagggggactgaaacacgggtccgagatatactacagcatccttcagccaagggtaacctgtgccccccaaccagcgagacaagaacttgtatagtacaaagaaagaagtgttcaaagggagagcgaggaacttttgggaagtttcataaacacaaggtgaacatcatctgttgtgagaccataacaaagggacatacccctaccacaggagacattctctacacaattgcttacaaattaaaatggtgcaaatgtttctaa

SEQ ID NO: 1658 - protein, 233 aa, Mus musculus
MQHAPYLVQSVHPNVSQGCQGGCATCSDYNGCLSCKPRLFFVLERIGMKQIGVCLSSCPSGYYGTRYPDINKCTKCKVDCDTCFNKNFCTKCKSGFYLHLGKCLDSCPEGLEANNHTMECVSIVHCEASEWSPWSPCMKKGKTCGFKRGTETRVRDILQHPSAKGNLCPPTSETRTCIVQRKKCSKGERGTFGKFHKHKVNIICCETITKGHTPTTGDILYTIAYKLKWCKCF

SEQ ID NO: 1659 - DNA, 99232 bp, Homo sapiens
  misc_feature (1)...(99232): n = a, g ,c or t
gtttctctcaaagaggcatttagaagatggtcatgcagagaaaatactttcatacagtcctcactaacaggtatgcgtataggagcaattttgaaaacagttaatttttcaaagaaaatgagtaaaaagaaactatatgcattttgccccacatccttgcattccataatatatactcacccactttccatctttggggcatgttctgggtaatttttcttccttcctatctcatgtcaaatatcaggtgaatttatgtcattgttttgagaacaatttatgtataatattttatgcaatctcctcctatgtttaggaggttgccataatgtgtcaaatgtagatttttcttaatacttcataaaactatctctagaaaactaagtgcatccttttactaagttcatccctagcacactcacacagctccttttgctgctgctttttcttgcagcttctgcttctgcactcacttttccacctcccttagttactcggtgtccttatcagacacaggtctccctcatactcacacttcataatgcccctgaacaggtcagaccctctctccttgtcaaatttcagagatgtgttcagaaggaaacaatctaactaaaataattcacccattcttaactttcttgggaatatttgcatttaaaataaatttctaattgtgatgatttcaagtagtatacataacgatgtgaataattttaacaatgctaaaaaataagtagaggaaaaatacaaatgtacatgaacagagggaaagcaagctacacatacaaacataattatttgaagaagaaatcctcaaggcattagttgtctattagaaaccaggctgtccttgaatatctagtataccagttcttttgggctgccacaacaaaatactttagattgagtaatttataaaacaacataaatgtatttgttacagttctggaggctgggaagtccaagatcaaggtgtcagcagagtcattgtctgctgagagcttgctctctgcttcaaagatggcacctccttgctatgtcttcacatggaacaatgggcaaagggagcttcctggagccacttttataagggcatgaatccaatttataagagtggagccttcattacttaatcacctccccaaaggccctacctctaaaaaatacaatcacattagagattaagtttcaatatataaatttggcagagagcacattcgaaccatagtacagtgtatttttttaaaaacacaaaagacaccatattgtatataacttacaatgttactttaaaaaagtattgattcttatgatcataatggtgaaaattcaccaaaaactcatgaaaacccaatatatcattcctaactaaatcagagaatcaagtcacaatgaggaaataaatccattagttaaattgcctcctttcctaaacacttaaggtaaatctatgttgtagggcaaaatgattgtacctcatgtcattaaatctcagaattatggaatttaatgagatagtgcttcatgtttctatgcactaaaatgataagttctgctgccatttttagtagacaaaaggaaggcctcctggtaaggaggcattttcacaggattcttttcaatgagaagatgtctatattatattcacaaaccttaagtaatactatcctagctcttaagacaagagaaaagggaaggaaataacaggctgaagaaaaacacttgtgacttcccccaaaatgagaacattgaaaagatttttctctgagttccaaaccataattgcttcttatttatgtacccaaagctgaaaatttgtcccaccaatggcctggacctttgtactgctttgattttgtgaggcttcaagtatagaattaaaactcaattcagagaaagaactgatctagaaccagacactctgtataggtggtcagatagggtatatggtaaacctcagttttgctttcttgcttcaattaggtatcaactttctgactggccaaagagctccacatttggctttatacagaggttaataacctgcccattagctctggggtggatttaaaatagcctacaattctttgcagttcctcctatcaaaagataaagtctattgggtaaattctggaatctaggctggtcttttgacttgctttggtcaaaaaactgcagtagaagtgacgcttgtagggcttccaaggggccttgcaacttcctctctcacacttctggaacccagagagctccacgctcttgagatgtaatactacctgggaagagaggcctgctatctctgctgtgtcagctgacctgacagctggatgtagcatatgagagagcccaggagagaccagcaggagagtcagtcaacacacaaaattgtgagaagccataaatagttgatagtttaagccactaagtttagaagtggttcattatacagcaatacgtaactgatacaagctccatggaaagaaagtcctttgttctcctctatcttcttgcagaatacttctcagtgaggcaatcttatctacaaatatagaataccacctgccaaattggaaaaatatcatgaccaccaggcacctggagctttttcataatggcttgaaaccgcctacacctgtgacataccccacaggccaaagtgaaatcaaaatatgtttctgggaagaaaagattatatggggtgaagagaaggagagaagggcagagctaaaccagccctttatcactagtgagtaagcaaggattagatttcagaatagggaacttttagggtggggagagctggaaagcagaagggatgagcctcagcaggggatttttgataaggatgggtgcacaaaacactgtctggggagagcatgttacaaaggaataccagaatgtatagagagtgcttgggcatggagttggggcaagagaatgggaacagccagacacttacgaagaccaaccctgatttctttggtagttactctaaacattttcaaacacttgtaggaacaggggaaatgaaatgtcatctttctcacatgagaggaatctgtccacattctcactacagtaaaccagtcaaatcattaacccacacaaacccccacacaggtatcagccgtgaaccacactcccacaggatcaccactgagccacaggaattgctggaagaggaggaggcctgatgccgctcttcgagtctggctacctccctagcaaacatgtagccaaccatgaccactgacctcctcaaagcaaggcagaaaaggggcttgcccccctacctctgaatcagggccagcctaagcaaaagaaggaatccttccttatccccattaagattcaccattcgttctttaaaagctgtattatcttagacacagaatttatctctttcctcaccactatcactgccccccaagtattgttcctcttcccttccccacaacacaccacagagcccttatgacacagcagttaccacatggcttatgtgcctgcttccctcactgagggtattcaccttgagggcaggggcctagtgtccctagttttgtatctcttgggcctagcatggtgcttgccacatgttcagtgagtgctgaaataaaagtagccagacagccaaaagtagctacccaaagtggcaccagcagtaacaaatataaaccataactgatagtacatatataggtggagagaggttttcattctgttttgtttatgaatatggcagctttgaagaggtacttcctaaagcttgttgctgggtgtgtccagttcatttctgtcataaaccatagcattgcttttcatctgagcaccaatagaacccctaatataattccttcactgttcttgccttaaaggccatgcacaaaactctgcttcagtgtgtagcctggagttacccatagtaggcaccatcaacaaatattcatgggatgaatggatggcacattgacgttagctgccatctttcagtatgctttccaataaactacccttactcactgtggattgtgcaaggctcgttttggacctaacaggaaaaaataagtaaaaagtgacttagtcaaaccatgctttaagatcaatgtcagcttttgctgctgctgtttcttgactcccttgttctttcttttcctgtgacttcttgtttctgattgcctggctataattttaaacatgaactttgctttgctctttgccattctgattctagttattcatggcgatttagcccatgaccttgctctgatgtttgttgtgtgcccacttccttactttataagccttcctggcttgtaacataccctggccctctcccttcatgcaacttagttttaatcagagtgcattcctctggaaaggcaggatgacatagtaggaagggcactggcattaaatcagacaacttggtcacaagtccaagcactgacacttttgtgtcacttagggacccagcaagaatttttgaaagacatttttataaaatggccattttctatagtgcagacagggttgaagaaatcaagaggagatgttgaggcaccaaggaactaaaaagagggggaagccatttctatccctaagcccgaggagtcaaggagggtaaatggtgattctgaaacctacttgagtgctagagccacagaaaaaggactgcatgacagggctgtagtctcctgaaggatgtggcaaatgatgccaaagcagggaaggagtggcatcacttttccttcccatgatctgatcacccacaggtacccctggctaggcctgaactcaactggaaagcagaggaaaggagctctggttatttagtttatggaagtcaacttcttgggggacagagaggacagagaaaatagactttggggtaatacaaaacagccagaatcttataagcttaagcaagtgactttatctttctggattcggttgtctcatctatgagacaatgttttgagataatacatgtaaaagaagctgcaaaaattactcattggtattatccctcatctagcactctacatcttatacttttttttttttttttgagaaagagtctcgctctgttgcccaggctggagtgcagtggcgcaatcttgggtcactgcaacctccacctcccgggttcaagcgattctcctgcctcagcttcccaagtagctgggactacaggcacgtgccaccacacccggctaattttttgtatttttagtagggatggggtttcactgtgttagccaggatggtctcaatctcctaacctcgtgatctgcccaccgcagcctcccaaagtgctggaattacaggcgtgagctaccgtgcccagcctacaacttatactttcatgtctttgatagtaacccttcaacctaaatctgtgaccacaaccactcaaccttcactgttgaacttcagaagaggttcctgggatgaagggtacatggatataaatcctcatccaaagataagaataggaaaaataaaatgtgacttttatttccaactttttattccaaaaaagaaagtaataacataaagataaaaagaatggctcttagtgagatccacattcctccctcatctgtgattcctacaaacaggtctaaatgagtgctctctttatgagatgcagaagtcctttttcctgctctctgtaggactctgcctagaatctcgagtttataatttgttctttcttgttgtcccaaagtctgcagacatctagacagattgaacttgtcctggatttatctttgctgggccagagtcatctaggattcttgtaatgggttaggcatttccagaaaatcaacaagtttgaaagcagatttctaaatctggacctattcaattaaacacaattctgtaagtaaaagctgtgatgtcacacaactagaaatagctctgacatttgcaattacaagtctgtctttctttcttagaaatagttacattattgtcagagctgaaaggaactttggaaatggtttagttcaatttcctcatttttcagatgaagaaacctgacacacaacaatataagtagaaaacaaggactcaccttgatccccagattcacaatttagtgccctcttactacaacatacagcctctttgtactaaagctccatgatcatgcaaaattttctgagctgttaaattctttatattgagtactattggatattcacattttaagtgagcccagcaatcaattgatttgtgaaataagttttaaacttaggcatataccagatggtgcttgccacaattacataaatgtcccataacttcatctgggaggaagaacattctttcttgttgacagaaagtaatccatcatgggtcttgattttctcattttcttaatgctatataaccatataatcactttttaaattgctacaataattctgtctcctttctttctctctctaaaaatagttttccatcatctactaatttcaatggtgtttaaatgctgctacccactctgtatttcagggatgacttctagctgcatcagttacacacatcccaccagcagtaccctgtttgacttactgactcagatgcatccagatctgagtaactggagagctgtgcattttcagaatctgcatattcgctctgtggtataatgactgatgtcagccccaactttgccaaacatctctcatcactactagttatatccctttccaaactattgggcttgctctctctttctggagcacaccccctttcacatatttgcagtatggattcaacaatatgacaatcattttctttccttagagtgccactgctgcaatggataaaaataacttgttactgttgtcactgcctggttggaataagtggaaggagagatgagaagttgcagtatctagtcgggatatgcttagcctcctatctttgttcaaagctattctattctcctggcccaagtctcccagtctcctggttatccaaaactccctggaactaatgtgttttggagaaaaataagcaaatgttgacctctatgctgagcctatggtttttaactttctttaggcttgagctctgaaatccactggcagccacaggctactgtgagtgttgttttcttgtttgaagaaaaaaaaaaaggtactatgttttagaaaatatgccatggcatgcttttcataagcttctaagacagttgagggaacgtaaaactcagccaggcaagtaaacacacatttaatatgacggtaatatggatcaggaaaaagttattctaaagcacagcatcaagagagaaagaatactctcctcgtttatttaatgttttccttatgtttcctctgagcagagcttattccttgacaagcttttccttcccactgcatctagcacttcttttctgggatggctcaagaactgtagcttctcatttggtttgtttatttacttacactgccattcctgttctcatccaaactaacatgtgtctgcacaatgcacagtgaaaagtaaatgtctttcttcatgtttatttccctgaagttgttcatcaaatagctttttcacatcccttttgcaatctcatcccatccggctcaagtatcccagattagaaaggctgtctctggagtccttttcaaagggagcctcccatagtctttaaatcccccatgttttatggtgcagatattcaggatttgaggtattagcaagaaggaaagcaaagcagatggggacaggcacagtaaaatagagtggcttcttttttggataatcattattggaattgtcttgttatctgtaacttcgctggttcaaagtgataaactcagtcatttataagtagacattttgcaacagataaaggatggaaagtctgtgtgtgggggtgtgcacacacatgtgcatacaatgtacagaaaaagttctaccactgaaagagggatgttgtaaatgggagctcttaaaaagaaggcaaaaatcataatcctgttgaggtgtcatcttcctcataatatcaaacctaaaggagactatgcctactttcgaaattccaacacgagcatgcaaaataataaatgatatttaattaaagaattaacatcaaaaggccatctctcagattctaatttttagcatcttgaaaataatgcatatttcaagttcccttccttttgcatccaggccactttatcgcctctatcctacttttgggatgtataacaaatataccactaaaggactccagagacatacaattcacagcattgcaaacttacaaaatgctctaattcatgtaaatttacctaatttacataaattgaaggcaatccagtaatagggattacaaatggaggaaggagatagaagtgcaagtgtcacttgctactctgcaaggctttagcaattgacttacactgaattatttgagcacaaaaattagcaaagcacctatgaatcagggactctttcaaagtgacctcccagaagtttgctgctgtgttaacctgtagtgctagtgtagtccttcagatattctgttaaatataatacatagggcaggcttatgttaaaatcacttgaggcttgtgactttcgactaaatacttcttcagtaattactgaaaagttcatcggctggtgctaccggagaaaagacgtggaaagctcaccatttactaacgacagccagggtgtgccccactcaggggtgccggccctctgttctcccatccctgggtgggccagagcatcttactctctgctgccttgggcctccacttgggctgggaagataagaaagtagtggaccttccccttccttccccaagactgggaaaatctttccaaatcttattcccagtcttccagatgcgagattagaatgtacaacagatcctctcaagaacactgggagaccgagggtgggagagaaaactccaaggggggcgagctgactatagagggaattgcctgagcgggaaaggaatcttccaaagccacagaaaagccttggtttggaagaaagccgtagcacagctgcatttccaacgggaaggtcctgagcgcacacacttctgggtcctccccgctcggagcaggtaaacctcagagtagctgaccggcagcacccacagagtttcctccccaccacccgcctggcgaccaactgcagccgaaaagaaagaaagaaaggaaagaaagaaagaaagaagaaggaaggaaggaaggaaggaaggaaggaaggaaggaaggaaagaaagaaagaaagacaaagaaagaggaaggaagaaagaaagaaaagaaagaaagagaaagaaagaaagaaagaaagaaagaaagaaagaaagaaagaaagaaagaaagaaagaaagaaagaaagaaagagaaaaaagaaaaagggagaaaggcaacagaggagaaggtcaggaaagccgggaacaagtcagcagccagaaactctccagcgatctgccaagggggagagggtagttgcgcgccggcgctggggatggggtgggggcgcgggggcacaagggcgcaggggcgcacggccaccgacagccgggtgcgcctagcttgaggccgcggagaggagccgaactgggatgggtggggggtcttcggcctcaacactgcctgccagccccagtgcgcccaagtctccccgccagagctgcccttctggaggggctcttcgcacgcactgctttccccattcttctggctggaattctccggccgtcactgcagtgtccagagatgctgcgctgtagacccgggaccccttaggcgcctcttcccgtccctctgccaaagcgcaacgcctgtacttttccagctccctctttccctcttgaaattgaaagttattgaggtcgctcagggttgttgctccagcagtttccttccccgcccccgagctcccccccgccccccacagccatcccccctcctctccccctccctgccctcctctccctcccccctccctgccctcctcctcctcctcccctatgtggtgctcccgggagcccagcccaacactggagcgtctcctgctcgcgcacgccagaagcagctcggggtctctccgccgccccttggccatggccgctgtgccgacggcgcccgctcccctgcgctccaggggcccccgccgctgcagccgcagccgccgcagcttctgagcccaaggggccgccgctgcagccgccgccgccgccgctcgcccgcccggatcccgcctgcggcagttgccgcacaacatgctacctgcggccgccccggcggctcctggaaccccggttcgcggcgatgccagccaccccagcgaagccgccgcagttcagtgcttggataatttgaaagtacaatagttggtttccctgtccacccgccccacttcgcttgccatcacagcacgcctatcggatgtgagaggagaagtcccgctgctcgggcactgtctatatacgcctaacacctacatatattttaaaaacattaaatataattaacaatcaaaagaaagaggagaaaggaagggaagcattactgggttactatgcacttgcgactgatttcttggctttttatcattttgaactttatggaatacatcggcagccaaaacgcctcccggggaaggcgccagcgaagaagtaagtgcagggttttttacgcgtttgctccctcccgccgcgttcacctgtcgggtcgctttgcctgtccggagccggctcccaactgcagcggtcctcccgccctgcgcctcgcagaggagatgcaggttcgggctttgggggtatggacggcgtctttcacccttgcctctcggcgcccctgccttccgcagcatcctagccggtgcgaggggcgggcggacgcggcgctaaggtggctcccgccccatggtaacttcaggttcgcgggaaagttcggtcctgggttagactcgcacccgggatttgtgctttccttttgaggatcggacaggggcacccagccgaaggcacttgggactcccagacgcaggatgcctctgaccgctgagtaaatgacaagggaggcgcggccgcggtacccgctcacctagcgcaaccgcctcgcgcggggagacctcggctgggcccttaggctggactccggtagccgaacgcccgctacccggccaggaagccagggagcgagcgcctgcgcggccgcatccccgacacgcaccagcggagccaaagggcgcgcgaggcgatggggttcgcgtgtctgcgcgtttgcagagctgccggacgtcccccgcccgagggttgaagacagcaaaaccccagctgtggggagccggaggtgcggagtttccaggttctctcttgtcacatgtgagcgtctgtaccatctctggccctttcaagtgtgtcccctgggacacacacgtacagagagtggggtctccctaaagattcgcctcctcgctgcccttaatgctgttatttggagggttggattgtgatggcttcttaagacggtgtcctagctggaattaagcggacaccaccacggcagcctcaacctgggttggtctgtctgaaaggtagaatcttcccaagatgaagggacagatgcgaaggtgtcacctctcctcgctccagggtagcctggcgccctcgctgctctagtgtctgtgttcccatggggagtcctttcgcagatctcagagcaggggcgaccctggctctatggttgggggcgctggtggagagagggaggaggaaacttctcctggagctcgcgaggggcaggaagcgatgctgctgctctgggctctcgcacctccgcggcgtgcagcccaggcccagcggccccacctggtttcccaaggggatccctctcccagcgtcccgcccgggaagcctttcggggcagacgtcggggcagcgcggaggacacaacaccggcttgtgtgagatggaaatttagtaatcgcttctcggccgctgtttgtccctgccctgcccctgggcatgagggtcccctgaaagctccctttgtattgctggcctcggccagacaaggtttgattcacctgaaaattgccttttaaaaaggtggcagtgccagagcgacaggggccctggccgggcctcaccgcctttaggatcacctagcagggggcaggagagcccaaactaaatatgtcagggcatccgatttattattcttggcctccgaatggtgtgtactctggtaactccccacccactctttcattccggcccggacgcggaaggggaggcctggggttcagcggtgtccacgcgcctggcggtccccgcctcctctcctcccagggtctggcctggggaattgagtctcagggtcagtgggcatagggagcccgggctggagcgcaacccactctgctttccatccgctcttccagcccgtgcccattgggcgtcccagagcacgctctctcctttacccccaccgaggacccccgggctgggagccacacacttgtcaaggagggacagggtactgagtgtcagaggcgtctcgctttgcagttttggggcccctgattctgaaggaagacacaggaaagaaagcttgtagtccttttgtgcccacctcccccagcgaggaccacggcgcaggaagctttccccgggcgctgcctcagggagctgtgggatgatgcacctctaggttgggccgagaggagtcaaaaggcaaactgcttttcgacctgccttaatcatctcaaggccaagtcaaaggagacctctgtttgtgttgaggggatgaaagaaggaatagtggaactgggttgcaattccaatttttctgtgggagtgggactgggagacagcacccacagcgatgctcttgctccttcgcacttgagtctgcgtttgcggcttggtttgctggtgcaatcctggtagaggggcgaccccttgcgtcctcggaggagacagactagactcttggcaggtgcagtatgacttaaggaggaaggagtggagggtagagaggtcctctttaaatgcccagaaactcaaggtcaaactgcatgtgcacaaactcagatataccgtttgttttgaaatctctgggggaaaaaaacgaacaaaaagattcaattcacagttcctgtttctcaagtaaggactaggaaaagtttttaaaatgaaaacatgtggtcaaacgtgttttcaaaagaggctggctatcctaattgtttcttcaagagacaattaagtgaatatttaaggagtcttctggcctgtagttatatagtttcaatttcctaagcttaaaatcatcaataaagatatgacaggtagaaaattaggtgttaaaaacttctacaaaaaatttaatggtctctcttgatttagtaggaaacttttttgtaaacaagaacattcatttgaagtgttaaatattgtcatgtccaaagaatcatgcattatcctcagaaatagcaaataaagccatatcagtattctcctgtttccctaaaacaactgtaattccatttgtctctactttgatataaactagtgatcctagttattacaaactagtgtttcttctcataaaagaaacaatgttttaagacaagacccttgtactttaaaatgtctatttagttatgggtgaataaatacacaataaatttttatctatttgaattggtatacagctcttaaaaatgactcaacctttgaattccagattgtgtgctaataacattaagaagcactttttttttgccataatgatagccacagaatcttagtggggcctcacattttcacgtggattagttgcttgggccctgaaatagccactgaagtgaagaagcaggtacttatcttcccatcttagaaagaaaaggcctgagaactagaggctcagtaacctacataatgccatatatctagcaagtggaacttgtctcctgccatgaatctcacagttatgtacacctttattctatattctggtcatagagaagatatcaggtttattaagtaataaattagatggtctcaaggccatcatttattcaataggtttagagaataaactgttctccttgactggaaatttttgaactcattattttatataatggtgatcaatgtcaaagaattaaatacctaatagtaaagttttctaaacggaatatatcatttgattatctaggagatactatgggattattctgtgccagaaggttattgttagaaacatcagatggcatttagcatcctttttatttgatgccatctagtagctcggttttaattgttcagactctagataaatgcaagttttgaaaagccattatatgcataataatttaaaagcactcattgcacaatctataaaacttcgcaagtctttcataaagacgtctgaagaaagagagaaagaataaaaaggaaataattttcatggtaataaaataaaaacagactattggaatgtactggtcattgctcatgacattgtttcagatgttgagccagtctttgaaattatgacacaccctttgtgattatgttgtgaatcctggaaaataacaagttaactgataaaatagaaaaatctttaattctactatacattttgtaatattaatttcaaatgaaagtttggtttggatattgactacaatgtatttttcacacttgtctacgtttctcaccagtctgccttatttttgagagtaacagtgttttaaagatacagacacgaatagaatttgctgaagaaagtgtattctttgatacgtcgtgtaacagctgtataaatcaagacaaatgcaaattcatatgcggtagtggcaacatctaaatgcaaggaaaaacatctttgtgaactcaaatttaatcatcattacattatcagggttgtttctcaaaatatcccatggtgacactattttaattccgtttattactttaatagaaggattttaacaagaacgttagaaatggtaattttaaaataccttctttttagccccaagttactcaagtaatgagaatgtaagaatgagtatgaaactgatttaatgttgttatttcaatattcctttaaacatgaaatatgaagagtatttgaacttgcaaatagataagctttactaagtcatttctccattaaataattccctggcatttaatattgtacaaattaggtccccagaaagcaatgaatggaaattacaacgtgtagtaaaattttattttccagttattatggggaaacccttgctgcattgctccaaaatgaatttattagacatctgattattttagattatttgaatctggacagagatctccagattgctactaaatgtctaaaatattttctagttcaatggttaatctttttttagttgtaataattcttttgaatcctatgcaatgttggcagagtactatgtagagttttcagagccctatgtagagttaagaccaaaatacacctctgcaattataagaatgagctatgaaaaaataaaactattctagatatactgatttgccaaattgtcttttcccctttgtctccatcccaatgtttcattttggacatatcttgatctctctcttcctacttcttcactattcactcacatatcccatccccaccccaaaaaaattattttccaagtagtgaattcttgaaatgccatcagagtggatattgtgtttcatgaaatgtaagaaaaaactttggttaccattaggaaaacatcattcagttttaagagcacagtaaggatcatgcaagacagtgtgttgaaattatgtttgacttggttaggactatttcttctaacagtgcattatgtgctggcattttttttttgaaaataataatttgaaaaaatgttgcatcataaattgcacagttttttttttgcttggcctttgattttaagggcaaatgtagattgctttcttaattagagatttttctcagggtttcacatgattgaatatcttaaaatttaatatctgacaacctagtaaatttgaaatgctttgcaaccataactaaacacatgaagtacagcatatacatatgtaaaagatgctagccatcttttctgtttcttcaattctgcccatcagatctttccattcaggaatattactggcattctgattaaagtagtcatccagcaatactgaaaagaatggggtgttccattctcaaagactgtgggggtgctgagaatgctaaatatctaaatgtcattgattgctaagaatcccattttctgctctaaagtttcaataacatggatcttttaagcaaaatacctgaattcttttcacatttgaactgtttgaataatttttaaattttatttttaaaaaacagggttgcaggtgcctcttatctgataagagcatttctgctttatttgtcacttggcaagggacctaggtgctatctgctgtagctaaaatttttcttgaatttttttagagaaaattcattggtactaaagaatatgattgtccaattaaataaatatttaatggcttttaactgtccttatgttttatgcaaacatctaatctactcttcaaaacaccgccttattaatgtttcatctgacctttagaatttaattaattgcaagtatcataagtttgtggtagaatctgagacctgagaaagaaggctccttagtgtatgttgggagaaggtagactcagaagttaaagacctgggttccagatccagcattgctgctaatgcctgaataacccaagaaagtccttttactataccaagctaaagtttttcatctgcaaaatgaggaggttgatcaaaaacttagatctagtgatccctacggtttcctcaacatttaatcttttggtatgagaatataagtcacaactagggagttaaataataacttgtcttattcaactaaatttaacagataaagattgagtacaaacaaacataaacattcattgattataagtaaatttatcacataaaggttaacgagtaagtgatcaatgtggataatgaattaattatgatatacctcataattcacattttttattgtctgaaaaccatagtcacagcaacaatcagcatactcagtctaccccatcttgtccttaggctcagggttagggagctggatcagaatactgactcaagggtcacttcagagcttccctagcatggcaggctttcagaggtggcctgtaattatgaggaagagatgatttacaatagtccaggtttaagaaaataaggccctaggctacaacagtgaatgactgcacaaaagagtatatacagcagataatttcttttaatcaaatcagtagttcttggcaattaattgcatatgaaagggaaagagatggaggcccatatttggcaataaactttggagtataaggactcaggtctgggtgaatggaaaaatgatgacgatcaacaaaaagaaaaataggagaagcaggtcttgttggaaatctgtttctcttttgaggagccagtaggacgtttaggaactcaaaactcaaaacacctgggattagagtattagggctgaacacaagtacttcagagtcactcacataaaaatgatgtttattattatcaaaagtgtgtgctctcctactgatacgggggtgtaaaaaatgtgtgctgtgatgacattgagactcactcttcttggtaatgtcaaaataacattaattacattaaggtaccttgtctattttaagtagtttaatatatcattttcaactgtggttttttatggtttttataatactctctgtgttacataagaggatggtcactggtatcataagctgtagttgttgttgccaaatcttgcagctgaaaattgcacttagaagtcttcttacctgtggaactttgccacagatcataaggagacctgaaaaactatgataatgaaaggcaagtttacataaggtataaaaataaaattttgaaccattgaattgggtgcagtatctgttcatcactgtagcgttctacttttaagtagatttctctacaaagtatgctctcttaatataagagaatctctggaagggataaaacttgaaagaatccagtccatctacacagtgtgggatcacttctacaacatccccactgagtaactgtctagcctcagtaacagtcagccccctaagctctccccctttttcctcctatttttagggcttctgtatccaaagcagtttattctcctagtcctcttctttgcacttggcatgggcatggtattagatctagttaccttaaaacacctttctaaaatgaacacacagtaacgcaatgtgctacattcactcccaaaaattgtccttagaaaactagctggtaagcatatttataattataccccaatacaaagcacattcctgagagtaagtggtaaagcagcccccattttataaccacataatacaaaccactaccacacaatataaaataacagaatttgtgagctgcttattttagaacactgttttcttaacatatgctcgataagttggtaagaaaaacagcagtcctttctcattgttttttgttcccctgttctacaaagagacttcaaaggtaagaacactgtcatctcaacaaaggctgtcatatatgcaaagcaaatatcaatcacattttgccaacaagaaataatatgccaaagtatgtgtaagtgctacatggcaaacaacagctttttagctctcagagccactgttatatttatgtacatcttatctaaatatgcatgtatacttactaaagtgagtattatgataatagttattactcaatagctcccatgttataatcaccagtaagtgccagaccctttgcttgatgcttttgcaaaaattatctcatttgatcttcatacccacctgtaaggaatgtgccaatagtcccactttcattgatcactcaaggaattgaggtggacctcagattccagtctaggctagactccaaagccaaggtccttctttgattcttcactccaccttaacattagggttggtacttgaggcaatcatggtgcattttctaaattccacccactctttctttctcttactctctcttctttcctccttctttctttatcctcatttaacaaaccataagccttttttcaaacatttactataaaggttgcttctggtattcaagtaccctcctctacatcgctttcttttccttaccctttgtcctctctttccttaaacctgtcttattgatgagttttaaacataaaagtttgctgattttttcattaaaagcaataggattgcacagtttatatgaaagactctgtgattgttatttccatctatggtgcgcgtaaccaagaaaagattaatgtaggcatgagaatgttggaaaagtctgtaattttgcagttaaaaatcagaatccttctatgtaatttacaaccacaatagatattttactggctattgttatccagaaaaagttatctttatggcacttcataaagtctgttatttatattacttttaccatgagcattaacagtaacctccactctgaattcttgctttatgggtcttggtacaatgattttccgccctgaggtcacattagaatttcctggggatctttaaaaagatactaatgcccagactccacccttgaacaaataaaactatcttctccacccttgaacaaataacacaatctttggggatggtacctgaatatctacattgtttaaagtagttctggtgattctaatgtgcagccaagactgagaaatattgtaagagccttaattcaataatgactattgcagctaagcaaccactgaaaaccatgccagttttgggaaggctagacagacaaaatagacgtatgtggagtgtgattacaaatgagatagatgtcatttgaacaaatagtagtgtaaaatataaagtattctgatactgttgatcaatactctattgatctgtattgttgaacaagagtattattaaacttgtagcactgattggtacagacaagactgtctgatagagaattatctcagtcaaaagaacagagcaaaatgcacacaataggacacactagtgaatgtaacagatgctggcttcatagaataagaacacagctactaggagaggtacaaaccatgggggagtgtctttgctgctgagctatattgtgtggagggagtataaataggacagttttagaagatgggtatcagccatactcaaactttttttcaaagctacttaataataaacaactgtttttatgtcttaccagatgactggtaatgtgccctagagtcctccttgtttttagggaaaacttaatggttaggaaatacctaacgagaaataaatgtccttttcttttatagtttctacagttcctgactcactttagattgactactggtgatcactaaaacgactataaatagcacagttttaactctaccttaatgggttctgttttgcagtaggtcatttattcatgaacttatcatttctacttcactcctaatgtgctcttctttgggtagttatctccattaaatcgtgtttatgagtcttttttagtccatgaaggattttcaaatcttgccataaactggggaaagttccatgtaaaagtggggtggaagtctgggcttcctgacagacttaatcctgctagttaagggggctctttgggataatatgggttccaatgagtcactaggccaaatcccaataaccgcagttgccaaaagtaattagactgaagaaagccaggctccttgggaggaaggtcatcacagcgagctttagccattgctccaacgtcagacctagttaattgtccctaaggatggagagcaatcatgagttccagagagtaggaaatataccagaaaacaatgctttttcactaatttttttcccaataggttatttaccataagcgtgcaagagatggaaatacgtcatcagtatgtgcagtttatgtcactatcctcataaaccaccttgtttgcctgtgtgaatgtacgtgcccacatagagaactcccaattcatcactacaagttctcctcctcccttcctgagtagataaagaactcaaagaatctagtctaagttcataaaagaaggtgtctgactagcatggaaatggaagggaaggaattcttgtaaacatccttaggtcaacttaaatatcatattattgaagtaacatttggcaacaagaaaatggtagtacattatatcagacaagcaattctaaaatatctggagctagaacaaacttatgatttcttgtactgaaaataattcactttagaaacatggtgttgtaagtatctaagtagaaattatcaacaagtaagtggtgctataattttaagctttcaatatttgagaaattaaaagattgttaaacctttccctaggaaaatactcaagtagcacaaaagtattcttgctcaatacccaaagtaaaaatttgcctttgaaaccattggcttggatacccagaaaagatactccatcactttatgtaacggatctttaattgaacaaagacactgtccttacagtggtaagtttcaaattcctttatggttcagaatgacttcagtatatttcagcactcttttgagcttagactaccagttctcagtttaaatatgtggatgagtgatattgcttattttaaatctacaaacaggaagtcaaactctttttctggccagctttttctggcaactggaaatctccaggtatcatctggcagacaaataaaccctgtccttgtgcactgcacacatctaatagttatcatgacctgattgtcactatggccaatattgtggaacaatgtatttaattttctttcatcttaaattgacaataagataaccaaagaatagaagaatcctaattttggaaaaacttagcaaaattttttgctgtgtttacttgtaccactggtcatgtagtttctgccataaaatacaaacggtatggacaaatgctgcttggccacaaactgaggacatactgagaagctacatatttgtttcttatagaatttagttttgtttttcaatttatgatgagtttttttttatatggagtccaaaaggaccctcgttgcttgtttggtaacaaggaacaaggtccaaacatggtatccttagcccctctgactttaattcacacactctcatttcatgccatcctcaagatggtaactctcagtcccctccacaaagactgaatataattttaaaaggacagtctttctttcatatagcacatttctaagacatccagccaactttccagttctatccagagcttaatgtagatccaagcttttaacacagatcagtgggatttccttggaggccagttaggcttgcagtatcacatagatgcatacttggccctagtacaatcaataacatttgctatcatatccagcctgtgtttttaaacctgtgggcattatgtgaccataccccaaagtttagtttctaacagaataagggagagttgcaggaagagaacctccaaacaatttcatgctataactaccatcttcagtatccatgtggacatcccattgacattccaggaattcattttaaactgtttgcctctgaactgagtatgtgctctaaggagagcctacgatccaagaaaccttcatgtaacagtttttacccaaactatttaattcacaagctgttgggctgaagtgctctaggtcatcagataagaacacattcaaatgaaaattgccaagattttccagtgcaggatattttcgtcacccttcctagctcaaactcacttcctcatccactccacaaattctaaaccactactaagatgagttgaacagtcttaattttataatcttccaaagaaaaaataaagacacagacagccgagttaatttataaaacagtgctgcatttatcttggcagatgtcagttttccccccactagctctttcatgctgactacttagcaactcatggaggatcaagtcattcctatgtatcaagcaccttgagaaccattgcactgaataagtttggtgtgtctcttcacacacttcttgtacaaatttctttcctcatagacaatttatttactgggtctctgaaacctaaataatccctttactttaaacctgaagcaaatggagagtcatttttacaagagcaataaactaaagtggctgttcaaacactttacttgaattgctctgggcactgaaatacctttttgttaatacaaacccttcatattctagcaggaaaacccctgaaattctagggttgcttaaaattgtgtaaccaggaatctcccctctcccccaacaccagccccctgatcctgggagtatgccagtaattttgcaggattcattctgacaaactgttctggtgtaaatgtttatagaaatcttttccactagagattaaacaaagtttaagtaactgtgcctaaatgatagatcttagtagtgtttgcaacagcaggtctgatgctatctgatgcaaagattctgatactgtatactagagaaaaggctaaaggaaaaagaatcaagagaggagttagtatgaactgtatgtaatttgaactgcaaaatattattctaagttatctctatacagattagtttttttaatgtgcacaggatataagggaaatgagttcatttaaattgaaaaatagtaaaaactgactactcgtgctttaatggcttaaaaaaaggtgggggcaattacaaatcttatcacatgccagttcaaatgcaattcttggctagttctccaaattctcaccaaaatgaagtaacatatctgagatctgatctgatgtaagctctggtatccatattattatgattcaaaaactactaaaagggataactgctgagctctaagccttatattgaatattatttattaaaacagggtagtaccctaggcctcaagaggtgaaagcaaaccagtgttccctttctgtgctttcctgtttgcacagcattttcaagtgtttattatatactaagggattacacagctaagcaattaaaaacctcagaaacttcattgactgaatttcaaattaatgctacagcattaatgattcctgtgatactagactaggaaaggcatatgtcatttagactagttaatgtttcctctttcccttgatgatttaaggcctaccttaaaatttaagaacccatgaatcttaatttcatttctttgttggtaagtcacaatatgagatttcttcttaatatctggagattacttcctcattacagacataggatttttttaattttaagatttttttgtgaaaaaccattttagaaaaagttcaatgtaaataatgttaaaacatatgcaatggaactttactcctttttgttttgcttcaaacgtaatggcagtcattcactgctaagtttccagttgaatcctatttaaatactgtatttgctataaatgagcaaggaaaataatcaaaagggatccatggaatatgaaatagagactttataaacttaattggaagataatcctgtctttctaattaccttcttagaatctagattttcttgatttgactgtagtgagaaaaatcccaccttaggaggcagggacattgattttaatttatatattgctatataatttagacaaatcatttagtctgtgatttgattgtatccactatacaaatgaattcataatctttcatttatctgaaagcagaaaactgatcttaaagtccactcctccaacagtaagatcaatgagctttcccttttcatttttgtagcatgctctaaccttagatagttgcccgtccaaatgtctagaatgctgagttatggctagaattcaaaagtttaagtttctttttgcacattcatggaagttttagaccatatttttaaaaagctaacaaggcaaaaaaggaatcttgttaggggaaaaatatggaaaaatcaaaattgaactcagcactaactacaatatcatacattcatttatttatttaatagctctttattaaacaattactatgtgccaaaattacgaaaatgagcaaaacacacctggaacttgcccttgtagtatttcacagtggttaaggaaagaaaatattaattcagattttaaaaaacaatatttggctaaagataaattagagcactttagatatcatttctaagccgaatagtacctcttttttgatttgtttaaatagcgttggaaattaattagtttacaatgaacctaatagctacccagatttttctctgggaaacagagacaaagctgaacaagaccacatatggggatgaagcaggaaggtggaaggaagattaactgaaaacatgggaatttattaggccttctggtattttcttgtcttaaaatttatgagcaatgaataggactcattacttagcatgccgtttgtgacaatcataggaagtatgctattgtccactttaaatgtagttagcatttttaagtaagccttgtaatggtgtggcatagcttggctgagtgaatttccatttttggcacattgactaatttctatagctgaactttcacaatagttcattaactggaattacttttcccaaacactaacatattgtatgttttaaaatagtgcattttttgtccatctctctgaagcattttcaaaccttttatggtaaccccatgaccaccacataaaacatacaagtcaatctacttaaagcaccagtttggcaaatatatgtcaacaagttatttggattcttatgtaactttgttgatgacctttcctaacctcagttgatagctttaaagatatcagttgccaaaattcagagtcttgaaaataacttgattcaattcttttcggtatgtgatcactgacttgtaaaggtctttaagtaaagaaaggctactaccagctacttccacatgtttatctcatggaaccttcacaacaatttcatgagatattattccattttataaataaagaaattgaggctgaaaacaactaaggaacagatcaaaatgacatagtcagagatggtaaacctaaactgtacatctagatcttctgacctaatgaatagctttcccaatacaccctgcttttcattaagcctgtaaaagagaatgccagaggaggtttaaatgagaaatagttatctttgcaactgagatggaactactaatacctcattagacaaaacgtgagggtgtgagaaaataaaccagactacttgacagaatggttacttaggaagtgccaggccaagttttttaactgtttttaaatcagaggcccaataagattgcaactattggccaggtgcggtggctcacgcctgtaatcccagcactttgggaggccaaggcgggcagattacgaggtcaagagatcgagaccatcatagccaacatggtgaaaccccgtctctactaaaaatataaaaaattagccgggtgtggtggcacatgcctgtagtcccagctacttgggaggctgaggcaggagaattgcttgaacccaggaggcagaggttgcagtgagccgaaatcgtgccactgcactccagcctggcaacagagtgagaatccataaaaaaaaaaaaaaaaaaaaaaaaatttacaactattgttcttaaaagatccctctgattggtaatggtagcagtagtagtagtaggaaatgggaagatgtgaactctattaataagggaggtagaatctgtaagaaaggtgattggagaagaggataaggagggctcctagatttctgattgtagcatcttcatggcgccatttgctgcaacagaaaagcacatgtcgattagatgtagtggctctcacaggtaatcccagcattttgggaggccaaggagggcaaatctcctgagtccaggagttcaagaccagcctgggcaacatggctaaaccctatctgtacaaaaaataccaaaattagccgggcatgatggctcaaacctgtagtctcagctactgtgggggctgaagtgagagtatcacttgaaccctggagtttgaggctggagtaagcagtaatcatgcctctgcactccagcctaagcaacaaactgagaccctgcctcaaaaaaaaaaaaaaaaaggcacatgtcaattaagtgtacaatagttttaatagctaggaagatttgtgtgaattatatatgcagcataaaccactcatgttactgaagaagataaagagagaccagagaagtaagtgacttaattgaagtcactttgcagtggagccaagagtagaaataactcctgtagccattctgtaataccaaatgctacacagcagatggttccaagggttgaccttccagagaagggctctatggatcctctgccaatctgatttcttatgtgtttaataatggccttcttggagagaattatctgttcattgactgaggagttgcttcacagtctctttatttccttactccaagatatgccaaactttaaaaagttacaataacctgttgccctaaagtaagatggctcatgacaaggcacaattttaaaaaacaaaccaattacacatgccgtactctcatcaaacacagttatccatttcctcatcaaacatattctattcctgggaatgaggaaggttcaaatctgatcctgagctggaaaagtatcattttgcccattatcagcaataacttatattaatatgattttgtacagcatatagacactttctcatcgtcttatttgatttttttctcaacacccttttggaatgggcagaacaggtgttatcatactcatttcacaattaaagctcaaagatggtaagtgatttgtatggtatcacaaggttggtaagttgcaaaacttagcctcaaaggtcttgtagggggatagttgttttgtttttctacagttctatgacttttcccacactaccacagttctcatatatctaccctgaagttcctactattagtataattcctttggatttgacaagaaaggcatgtatattagaggaaatctttattatagatgagagtcttactagctgacaatgtgaactggcagatctttaacgtcctgtcccatttgaatacccatgaatgagcttattgtggggagaaggagataccgaagcaagagcatcaagcattgtttggcaaactgtcttcaggaaaaagcagaaaacttgctgggtattctctatggtagtagaactttctgagagaaatggttgagttttgatataatgggatgtttattaataaatgtcattatgggctgggcacggtgactcatgcctgtaatccagcactttgggaggctgaggcaggtggatcacttgaggtcaggagttaaagaccagactggccaaatggtgaaaccacgtctttcctaaaaatataaaaattagtcagccatgttggtgtgaacctgtagtcccagctacttgggaggctgaggcaggcgaatctcttgaacccgggaggcagaggttgcagtgagcggagttggtgccactacactccaacctgggtgacagagagagactccatctcaataaataaataaataaatatcattataagataattgtatgggctttccccaagtatcatgatatttgttttactagacataatcaagtagactgttacaggaaagcagtttgaactagatacctctaaagttcccaaagtttatgattctattggctggaagctgactatatggatctcaatattctcatctgcaaatttaagggagaaggaagagcttcaagagccctttaaattccataggtaaattcaccatcctttcagatattatgtatgtattcctacataaagcattttgttcataacattttccctccttccccctttccatttgtctcagtttttcttttccttcaagttccataatcattcctatctgttctctgtagtctttagatatctcaattatcaataattgctcctgccttttaatttgcggcaaaaagtttctaatctatacatttatgggttttagaatattaaagtattatcttattaattgtattgtaggcttcttgagtcagagactatcttttgtctctcagtatgatcagtacctagaagactgcttccagtaatcattgaataaacaattatttgtgaagataataataatgtaatactgaaagtgtggtatttatatcaccttcgtcagattcacctgggatgcttcttatcaatgcagttacctaaatccactggattcacttccaaatcaaaatatttgggagtggcatcttacctcatcattgtaaacaagtaatccaggccatttttacacacagtaaagttttagaatctttagacctttggtttctctgtaccatatagacctttggtttctcggtaccatattgatatcatttctatgccatatcttacctttttcagtctgtttaagtaggtgtgtatcttcagtgagcagctagtgcctcagaggtcttcttgacccggatgtctgtgactcctattaaagtctgtgtctatggtacttaaaaagtagccactctatgactcttagtgagtttctggttccccaagcttctcacacctcctgtattagaagcctcagtatgtatcctcttttctaagagttattattggataaagctgccagctgcttcaaatatggatgatgataacacaggatgagtttagtgcctcttgagttaaacaaagtgtcttatacctatgattttgatgattgcctaagagagtcctaggcactttacacagcatctcacttaatcctctcaaatacatatcaagcagatattctggtgttacagatgaggaaacctaggctcaaaaaagttaaacaacttttgtctaaatatataatcagactggaaattcatttacacagataattggttatattcatctttgtatgctcacctactagaacactgtgtggatgttgaataatttaattttttaaatgaataactggataaaaaataaatattggtaactcagctagaaaacatgacaactagggttcaaaaccagactctaaatgagtgcagatccagtacctcttcaccctgtccctgtgctcttctgggaagtgtgcaggacccatttctgaatgaggtcacaatgcagggagccatgcacataagtataaagatgcatcatacttacaaaggtgcatgtatattcttcttcaattccgttagcaattggagccatgcacataagtataaagatgcatcatacttacaaaggtgcatgtatattcttcttcaattctgttagcaattttgtgaatctaggaaaaaaatcacttattttccttgctcagaattttatatgtgatacataaagctggagtttttaaaaatggtatactcactattggtacatcttctagtgcttgttgaaataccacaagtctctcacttgctgtttacttatgctaagacctcagccatcagatatgctactttagcatgctatgtagcacaaatatccaagtttattcacaatataacaaagtggagtttgtttttagcacaaactgaagtttgtttcattcaagaatgtgaagttagtagttatggagcactcatgcggattcattaccattaaactgtcacattttctgtttatgttgatttctaattatttctaaccttaaaaaaaatatatctttttttttaaggttagaaaaaaaatatttctaaccttaaaaaaaaatttctaattatttctaaccttaaaaaaaaatggaatgcttctctcagccagaccacagcacataatgattcccactgttggatgaacactgttggatctgtcttatgaaaaacgctgttattacctactaactcatcaataggtcctggctctacagaatctgggtctcatcaccctcatccaccccctcttgtcctctattcacctccacttgggaacatggccacttggagaaggggaagctttccctctcttagcaacagctggggatgttgattcagtaccttacattttacactcgtagcagagtgcattcactttacaaaggatttttctacttgcgattaggaaaaaaaaacacctctttatttttggttctgtgagtagtttgtaacagtttcaatagcagcatcaactgtagctagtcggttggtcacaggaaagttcatagggtttttactacttttgaagtatccaatttgaaattagtccatagatttttaattcatttaaggaattaaagaacataatattaagatactaaaagaaatattaaattagaagtaaaaagcacagtgttgttactctaagttatttagactgtttcaatatgcattgctaatggtaacaatttagaaaaatacaagaaaagattatatgcaagactgtaatttttttgctttttattctttctttgttcttatgacctttcatgtatttgataacttttttacttctccccacttattcccacacacacacttacacagaatgaaaattaaaatcccaaagcaaactaaaattactgctagagaaagatggggaggaacagaggagaaacgagatagtcccaagagcaaaacacatgtagattgatgcacagcctcttcaaagattggaatctggatgtaaatccccaagtttgttgctagttagaacattttcatctaatatacaagttaaaaagagaacatatcttcatggaatacaagatgctggttctgttccaagatccataaaattaacacaaattaaagtaactatatcagacaaaatgtgttgtttcctttccttctaatatttacttagaaatgcagaggctacatgtacttaggctttttactctggccctcaagggatgggaggatctggctccaaccaccctttgtaactcattttatagcactcaacgcattgcagcctcattggtacctgtcatgttgctccttgtgcccagcttctcccatggctttatactgtttgcattgctggtgctctacctgaaatactcttcctgggtttacataatgactcctccttattctgcaggcctcggctaaggagtagacttaaaggttcttccctgacatgtatttaaggaagtttcccagagttattctctgccttattcatctgtttgttgccttaacaacactcattacaatctttaatcatttgattccttgtttacttacttattaactgatgaacatcatgtcttcaggaactggatgtcttattcattcctgcctttcctgcatcacatgaaatgttgagcacactgtgggtgaaatttttgttgaaaaccttaatcatagtttccacagtgtatccatatacagtgaagcctacttgcatctatctttcatttctagtcctgattttggactagctgtggttaggcaaagcatagccttcagttaccaggttggctttgagctcccaaatattcatcatatcttagatttcatgaattctacagctaacatcatttgctagccattttcttaatattttgggctgacttgattttagtggaaagcctagctatttgctgcttaatgttaggtttgttttattgctgtggctttattttaaagtatttatagaatataaatattagactcccttcaggaaattattattcagtaagagaaaaagaaagattttccaagttctcaaagaaaccatttccattaaaaacagtatgtttccccacataataataatggtggcgcaccaactgggctgtattcagcagctggtgaagacattcctctctgagactcttaggaattctgtcaacctctggtgtaggcacagactttcagattagatgttgatttagtaggataaaagatacagtagactctattatcctagctgttaaagttcaattaatgtatgtacttttgagtttgacgaaagaccaatagaatttgtatgtaggtgtgtgtgtgcatgcatgggcatgcatgcgtgcatatatatatgtatatacacacatatatgtgtgtgtgtatccatatacacatgcgcagacatacaaacacatatgtgcacatatttaaatatgtatatttaaatagcataggtgaattttaatttacttaatggttaaaacattggtatattaaaaccctaaaaccatcagatgataaacagtatttcaaaaatggcagggtctgtatatatttggacatataaacatgtggttctttcaataagttatcaataaaaaataataatgaataaacctgtattcacccaaatatcatagtttgataatccaaaaggagtgttgtatccaaataagtaattatatttattcagaaaatcttgtgttcatattttgctatctatacctaactttctcaagttgcctaaatggttgtggagacctagccattgtcggctctacttgcaagctttaacacatgaacaaatgagaaacactgactctgaatattttcttgggttgactgggcagaattttagagagacagccaaataattcaaatttttaacattagacttttcttaaagtgatcgttgccaccagaggaatcgggaaacatctcttaattttcaataaatgtaatattactccaaacttaaatgtgacttcatactaatcaagtcccaagatatggtagaaatgtgttgtcctaatttaggcaagaaaaatcgccacattttctctaagggaatgaattactgaagtaaatgacacataagaaaaccattattacttcactttgaatgattgatttcataattaagcattcaaagtttatgtaatttgcaacatgatttctttgccagatattcataggcatagcccacttaaattgttatagatactttctgttaaacatttactactttaacatttttattattctttctttctggttgttttttttgtttgtttgtttgtttgtttttgtttttgtttttttttagacaaggtatctctctgtcatccaggctggagtgcaatggtacagtcttggctcactggagcctgggccttctgtgctcaaggatcctcccacctcagcctcctgagtagctgagaccacaggcatgtgtcaccgtgcccagctaattttttttttttttttggtagaaacagggttttgctgtgttgcccaggctagtctcaaactccttggctcaaggaaagtgctgggattacagttgtgagccactgtacctaacaacatatttatcattttttaaaaaaatagcttttttatatgtattgtgttcattccttcaataatcaaaaacactttattgagaacctattcaataaatagcttccttgaatagaaggtgggaattatctcaaattcctgaatctatagaggaaaaaagaagaagaaattatcaaaccatgagacctcttccctcaggaagcgtacagtcaatgtgagcacacttctaaaaagagaaggcatggaagaaaggacagatgtaaaaaaaactttgattatagaattcagttggtctcttctctctaccctgtctcttaaggccactgcatacagaaaaacaggcagtgaatgttgtgcagacaagtatgctttggagagattttatatatgatgtttttattgttgttaaaaataacttagatcaaatttgtgaatttattaatttttaattagattataaaatcattattacttttatgtatctggcacttcttttcaactcagtcaaacctgttttattagtctaaagtctactaaaatttacatttctggaaattagctacaaataaatgatcatcagcagtaattggcagcatgcaataatggatttttttcacataacaacttacaatagatgttagtacatttgtaactgagctttagaagtgaattaacgtaaagcaaatgcttgaagcttgcatttaaattgtcacagaaacagaatttagttcccaatactgtattagttgatacatcataaacattgaaaacaagtagccaaaggttgtatattgaccaagtgttctggttccatttaaaattctgtattctggatattttatcaaagttgaattaactcttatgataatagcaagtctcttaggaatggttgcatcagttatgtatcacaagttaaaggttatcaaatagtaggaagccttcttaacagatagtgaaattgaagttttttactcagggaatgttgacagttcagacactgaaagtaggtttaagttatgtatcagtgtacaccctttttgtacaactaaccataataaacaagttaagaaataatagttccctctttcttaattctaaagatagacatattaatttcactgtgtatgtgacacatttttagtagaaagtcccaatttaaagtttccatgaattctgcccattttcccactcatatctacccccattacacatctaaagtttacttatatataaagatatagttaccagatatcaaagatctctattttcacctctgatctaaactcactatttttccagcaggctattcctttgagttcaagtttgaagtttcaaaataaatgattatgatagcttctacttacttgtatcataaggcaattaccacagttaatttagcttttgaatatgctctgaaagcaacagtgagtgacctagaaattcaaagtattgtttaaagctgcttataatacattttgttctcttaccaaatgtcccctattttgcatgatgtcttctttttctgtaatttttcagtagcttccccttgttttttttttttttttttttttttttttcagacagagtctcactctgtcacccaggctggagtggaatggtgcaatctgcgctcactttaacctccaactcccaggctcaagcagttacggtagctgggattacagacgtgcaccaccacactgggctaatttttgtattgttagtagagacggagtttcaccatgttagccaggctggtctcaaactcctggcctcatgtgatcagcccaccttggcctcccaaaatgctgggattagaggcgtgagccaccgtgccaggcccagtagctcccatggcttttctaattaagtagccaccatcagagactcatgtgtgcatctccaacagccactccaaagtaagctccatctattaagcatcactctctggatatttcataaaatctgcaaaattaatgattccaagccaggtttatctttttaaacgtcagtattctatgcaccatgccctactctccaactgcaggcttttactcccctggtagcccctcccctctctattcactggctggacctagaaacccaccttttcaaatcctctttcttgttcagcctacatgccattggccactatatttggttggtaccacctcctaaatatccttgaaacatgcatcccttcctcactacattatattgcctctgccgtactttaagttatcatcagcctcttaccttgactactacattattcttctcctagtttgcatgcctgccacactgccagggaaatttcctttccaattcaaatcttaaatttcaatcactggtgtgattgaaacaccctatgtttacagaagaatttcattggcctatctcacaaaagtttctgtaatctagatctattttatacttccaatcttcttgttattccttatatcttcattccccactacttatgcaccagttgcatcaaactcatgccagtctccttcccagcttgggtcactgtagtgtttccttctctagccaaacatggccacttacatactcataaactccaactcattttctaagattaagttcaaacactgagattctgtgaaactttccctacctctccaccaacaacttcaaataatagtaggaaaatattgtttgaaaaaggtgatttagaaattcaaaatgaagttaatattgaatggggaataaaaagaaagacacatgagaaagtaaaattctattttctgtctcagaatcacaagattttatggctgaaagtgttgttacagtcaatatagaccaaagttttttgtggtttccatataaaaagtaaaatctcttgccttaaaatgaagtttgggaaatttgtacttagttgtgtaatactgactgtgtaatttgtatgatccttatacggcattcaagaaagctgtcactacactacataaccataaaaaaaatctagactcattgaatctgagcttcatagtcttcatttctctctcttcccacagccagcatttaaaccttcctgaagaaataaggtttgccatcatttgatattcaaaattcattgccatattcaaaattcactgattaaaacataaaattttattgcaagttgggacaactaggtctttcttgctttttcaaaaatcaaatttttaaaaacccttgcctaggaagtcattatatgaaaaaaaaaaggtaaaaagaattattgtagcacaatgttgactgtgctccatttcatcagtaaaagttttagagacagagggaatcaagcaaggtattttggcacatctcataatttcagtggatacagttacaatcatgagacttattcaaagctctctcctgaagaacattccaaacattcaaaacctagtttttaaaataaaatttatcttaaggaatgtcagtttttgaagctctgaatatgtaaatcatgtttatattaataattgatatatttaaaattatatcataattggcaaaagtttcagaatacataaaattagaattttgtgttttctttcagcagccacatttcagagatagggatggattggcatggaccaatatggtccatctttcttaaacccagagtctcttagtgccctgagtttgaagcacttttctttcaagttgaggtccactcttctatagacaattctatgaaaaggtcttacaagtttttatctacacctctcgcttcttgaaatggataatgatagattccaaacacatggaaatctcttgccccttttactttttaggatctttgcaagcttacaatatgtacacgttttctgtaagtcaccaatgctgagttactggcatgaaaaatgaccctgttacttggaaagtagtttcacttacaagtcccccaggccctgtaatgtctaaacctcctgtgccactttatgtgactaccccgcccccacagaggagcatgcacaggaaaagcagacttcccttcccccacacatttccttagtttatttacaaaacgtcttggaatgagaatgagctgcttgtggttcctgtggctgattcagggatggtttcctacaggcagaggatgctggtcaaccgaatgacctctctgtaactaacccgtgcacccctgtggtaaggctgtttggtcttataggtacctcttctaactaagcttggagggatttgtttttgtggtaaagaacttagtaataaccaaacgtcactgtaaagacagatttaataatgttaaggtccatcagagcctactccttctactaccaacaagagaagccagaaatacactgggatgcctttagattcctgtgcatcaatctttctttctctaaggattatggtttttttttcttctggcatcttcaaaggacaataaagctattagcaatatatttgagtggagaacacattaggaaaagaaatcatcctaaacaccagctatatgagaaacatccgttagtcagtagtttttaccagctcatgcagaggtgatgatgactatttaatagtcaaaagaagatttaaagttgtgatgatcttaagcaaacatgagtctcccaaatattcatttctgtttgttcagacttgctaatgaacactcttaactcacacactggtaactcttggaaaccctggaatatgtgtaacagtgattcttaaggtagactggtccattctcaccaaatatacatttcactcgagtaagtagaagataagggcacagaaactgtaagactccagttccaaaagagaaaatattgaacataaattaccataagtagtcatatatgatccacatggaaacactggtgagataagcatcacattttcaccattatatctatttgaactggcaattattaagctcgtgtgagaagaaatatttaatgaaggaattctggggagctcaacagctaacatagcttcagcatcagtttgcattggatcaaaaagtaaaattgtgttctctaatacaccatagttcaaaacagatataaaacttagtgtccttactcaagttaagccctaatgtacattattttacttactgaagaaattagaaacatatgcttatcctccattacataaatgaaaagcaaagcaaatgtgtattaatttcactgtgtaaatgagcacaaaattaccagtccccaatctcccagggtgctagttcagtgaggatattatatatatgaagagaatatatataattagttatacataatttaaaaatatatattatatgataaagagactatgtatacacacacatatataagtcctttgaggcagtatattctttatttttcaaatgctcaattttaagaactttgaaattaaaaacaatacatgtgctaaagggaaataaaagatcataaaaaaagataggaaaaaaaatcccacctcattcacccattaccaacaaattgaaagctaatgaaagagaacatatatcctgcccagaaaatgtcatttttttatctgtgatttaacctttgtaatgtctttctacatttgtctccacagtgcatcctaacgttagtcaaggctgccaaggaggctgtgcaacatgctcagattacaatggatgtttgtcatgtaagcccagactattttttgctctggaaagaattggcatgaagcagattggagtatgtctctcttcatgtccaagtggatattatggaactcgatatccagatataaataagtgtacaagtaagtgcccacacgaaattgtatttttatctcatctttggtgacttttccagattgaagtggtctgtggggatatttgtgatattcagtgttaagtaaatgataatgtttatctgataattaggctaaaccatacttggacttaaccctgagaaccagaaaatttttatcactaacttacaaaaaagcactcatgttttggttttctttttaattatgaaagcaaaggctgggaatatgattattggtgattgaacctatagaaaagtactgcaagcctcaattccatctgagtttccattatcaacacaaaatccaagtattgactaacttgccaaatcatttcagctattttgacttcaagagagattccagagcaactgaaacatttatttatcaattggaaataaatattgggagtactgtcatctggaacctgaaaacctgtttttcacactgcagacccagggacctttctcaaaaatgtaaattaggaaataccactctattcaaataccatatgtagttcctccaaactcatctcctacaactccccctcacccattttgcaccagcctcacttcccttctcataagatcttcccacctcaagcctttgcaattgtgttctacactggctgttctagcagttggaaagctttttgtccacatctttgcatagctggctgtcttatatcattgatgattttgctcatatgtcaccttctcagagagacattccatgatcatcctatccaaaataatcagcctgttccccttgtcaaccaccctccatctctttttcccaccatttgctgttgtttttttgttttgttttccagagcacttatcactctggaactagactgcctggtttcaaaaagcagtctgatctgttgtcctgggttagttttataacttttgtgagcctcagtttccttatatgtaaaatgaaattataccaatgactacctcattggattgttgtaaactttaaataacttaataatattgtaaagcattatagcaatcctggcttacagtaatcaccacataagggtgaactattgttattgtttactgtatctcctctcctagggatgtaaactttctgaagcctgactcttacccctcttgtgcattgctgtcaaccaatataaaaaacaatgcctggcacatagtaggcaatcaaatatttgttgtaagaatcaatagccctcaagaacaacacaaagataatatcctttgtatgttttcttaaggttctgatgaaacattttcactatcacttaatataaacagatacttcatcttataaatattcttggagatatatatatatatatatatatacacacacacaaagttttttcatagggcaatcagtacaatgattttaaaatcaataaccaatgtacctcaactaaatcactgtggaggaatcgtgaattcagtctggcaaaataattttggacttcaggtgtttatttgatactaaagttgtgtgtggctgtgtctgacacatgtagaactggaccaatagttaagagaacataatgcaagcatatttctttcttttttctctttcagaatgcaaagctgactgtgatacctgtttcaacaaaaatttctgcacaaaatgtaaaagtggattttacttacaccttggaaagtgccttgacaattgcccagaagggttggaagccaacaaccatactatggagtgtgtcagtattggtaaggagaacctgtaataatttgagtaagtgataatgtcagtctccatggaggtgcttttcaaagtcctttgccaaaagaacttgaaggttcttgggctgagatctcttaaaggctgtctccatccttctttacaaagatactctcttaaaggtgtttttcataaccttatctagtatgtattatggtacaatttaatacagtaggtgcttccttatttcttagggactattgataatcgtttcaaccattctgtttatgatagatttatttttattatttagtgaatttttatttaattatttaatgaattttatttaagtaaacattcagccaagacacacatatgtatatctgacagtgatctgttatgtgacatacatatatgtcttgaacttaatttttaccttagagcaacagtttcataaaacacctaggtctaatctcaactaatgaccaaagttattttccaaggtgggaacatatattctcttgacacagcccattaatgctcagtaaatggatcaaagacctagagaactggaattgatttagttaaaatctcactctttttctctcatactgctatgctgaagtattctgcttgcacaggtattgatacataataaaaaggattgtggacttactcaaactgacagattgagacagtccctggggctgattaattgcaggccaaatttcctgaaggggaggtccctcagacaagttgtttgtctaagtaacagatcactgtcaggctgtattttcaatcttttaaacgttgtgcagctactacagctacaactttgatgaacacttgggaagcagatgctgaaccaaatggtaaaatagcctaggaaatctcaaaatcccctgggcaagaactacaggaacctttgatgctgcggtgatgttggcatatccacacaactgccctcctgattcagtacaagatagtctccaggactcccctggagtccccatcttaggggtcccttagaatctaaagggctggagtaataactctaaagtgatggtttaaccatttcaagtgtaccgtagcacttttatttctaaacaatgttcttgatagaataaaataaatagatattttaaagataattttagaagcatctggaaaacaacagtcttgaaacagttcgtggctcattttggttaagtttttcttctctagttgtaaaaacacatggaaaaaaaagcaacttaggaatagggtaaaaagtacaaaagaaagcacttcaagttctttttcttataggtcctgagggctgatgattagaggtaataagttccaaacactggaaaaaatagaaaacacgtctgtggaatattcaagagcagaaattcaggatgagttgcagaatgtttgtgacatttctctacccagaaaaaaggcacatatttagattttttcagttgttgaaggtgtaacattcagtcctggaaaggctatttaccttaaatgtattaatgcttttctgtcagggagatcatttcacacttggcactattggatttgcctttaaagcttactggtaatttatgctgctagtaagactaagactatttatttcttaacacaactacatttaagtttatatattttggaaaagaggttagcagtccaaaggccaattactgagtttggttcatttaacagatgcaaatgacctaggacactgtagtaacacaaatcaccaactttcattcagggctggctccggttgtttgctcaataagagatgtctcccatcatatggcgcctagcctgcaggtactacacctgccatgcctttaggccagtccagaatttcagggaagatgatgacctgcttctatatcacaaaggaatattaaagcctgttcctttaacaaatatgaaaactaggatccggagagccaaaatggtgatcccaaagaaacattttaagttattttcagtgctgtaattagtagcctgactttagcttcccactactcatccaatagaaagaatgtgtctttctcattgctaaaatccacaccgtatttctacttttctatcgagattttaaattgagaggaaaggtcataaacagaggaaatgctaccctgatatagagctgggatgaaagaggtatgtcacagtgtatctgctttccatggtttgcaggtgaaatgaaacagaaacatccactgaaccaaattttataagagaacatattcttttcactttgtgctccagatatttgcttcctttctgcactgtcattttgtcaccctcactgcttctcttagttggatttgttcaagaaacacagagagaatatatctcacttcaaggactgagtagcaagggacattcccttgctatgttctctatggaaccatgcaactagtcaacaagaattagagcaaaatgaccagtaaagtcactactaataggacatcctattcaactttcttgccaattcgggaatcccttttacagcatcttgcactgatgatcaaccacagcacaatcattcccagggaccggagctcattacctttatgagacatgtgcttcatttgcttcattagtgaatagctaaagatttccagttttaagattgttcttaatacagaagctaggaggaacacagaaggtgaatattctgtttttccttaactatctcttaaccaaggagtgcctcaattctacattgttcattaaatgatctgaatagaacctaaatcacctttgtgttgtctttagcacttttttttttcagttttcattttttttagtggaaatattatttggatgctaacattataggtttattctacagtgtttctctaagataaattcacctcatttcatggtgttttaactctctggtctcattagaactttttactacctaaactcattagttttgaatattttccctcctccaatgaaactatctaaggttgtccttagaatttaatttataaaacctttcatcttctgactataaactaataattacctaagctgtaattttttaaatacgtttttctaatgtccaagtgtacatttgcttagaccacttttgctattatgaaagagcaccgaagttctggtcacttgcacatcagatcattttttctaattcagtcctcttaattctggaattaaatgaatactggacaaagtgacagctcacaaacatagactttcctcttctcatttgcttttttggaggtgcctttttttgtaatcctaaggatacactactttttaatgattaatatcagaatgggatgctggaagataatatccataaccagcaagagattataatattattaattgacttagttactctattcttgaatgaaaattgtagtggtataactgagcatgaagactattttaaaatggttcaataaagttcatttcatttcacagaaacataaagtcatgtatttaatcaattccatttaattccgtgttgcactcagggacctgaaagtgtctgaaaagtcctgtgaaaaatgtataataaatggatttaaatttctaaaacatttaagttatctttcagcctctgctgttatgagatagcattctgctctaaagtaaggaatcattaaatcagaaggcaataagggaggttactggaaacttctttttgtggaaagatagtcttaaatcatctgaaagagttactgttgctagctgttgctatacattagaaagttttagggacataaatataatagcaccttgagatgtttcttttctttagaagttcaaaaatctgttacaacctgagaaagccgttattgaaaaaaagaaactaatacagaaaaaggaaacaaatctccaaaagaagcttcagaaaaagtacatcaggtcatcttaggaatcacttggtcaggttaattttagaagcaggttatcagctgaaattgacccagaattcacatataatagatgccgctatgcctgaaccatactcagtaacagatatcaatatttaagcgtacaacagcacatgtcgtaagcaaaggcagtaaatagtaggccaaagacctggattcattttctgctcaagcattctctaacacagaggttctcaaaaggagttcccagtacctgcaaatcagcattacctgtattgttaggcaaattcacagccctgccccagataactgaatcagaaactctggtgggggctaatggagaaaggtccagaattttttgttttagcaagccctccaagtgattctgatgcatgctaaagtttgagaatcaattctctagcacatagtataacaactgttcttcaaattctggtcaggatcaatcaacaattgcagcagtgctctggaaattataaagaattgatcaattttagtgattatattaatgttagtgcctgtgttaatcaatctagagaaaaaggaaatccaatgcaaaaatgagtttacctgataatgagtactaaactgaaaacattcaatttctgcctttcccattctcctgttttatatttaagtcatcttgcccgactttgatctgcaagattcttctcaaatgtgggcaagttctgatggaagcaaatctttttttaactcaacaatagtgaaagtggttgtaagccagctgagtctgtttcttctgttctgtttcagtgcactgtgaggtcagtgaatggaatccttggagtccatgcacgaagaagggaaaaacatgtggcttcaaaagagggactgaaacacgggtccgagaaataatacagcatccttcagcaaagggtaacctatgtcccccaacaaatgagacaagaaagtgtacagtgcaaaggaagaagtgtcagaagggagaacgaggtacaatcataataacaaaatgtgcttgtttgaatcctcataatctgttgcatttttcattttatttcttatgaaacacttggcattatctttcatgcctaatatcctaaaatgtgtaccaagcaagaatatgttgcttgtaaattacagaatatagatgtggtaattccaaaatatggagcctgatgtcagaactttactatagaagtgtgctaattgaattatgatgaactaggctgtattgtaagcattcagggcattatctgtactataatctgctttgctagtacttagaaaacttttgggaagtctcataattacaaagtctaatgatatttacaagaacaagacaaagaaacaccgccatcaaacattcctttcctcactgcctgcaaaccaaagtagtgaaatgtagtggtaagcttttgtagctaagtgtatatatatatatatacacacacacacacatatatataaaattaaagacagaatatcattctgtcatccaggctgtattgtagtggtgccatcgcagttcactgcaacctcaaactcccaggctcaagcaatcatcccacctcagcctcccaaaatgctgggattacaagcgtgagccgccatacctggccagtatagttaatactgactttattttgaaatgaccaagaccacattttatgaatatagcaaaatcattaacgacatttgtctccagatttcttttcatattgcatatttcttttcatatttcttttcatatctgtctccagatatcttttcatattgatttcttttcatattctggtctttatagaccagattacagaacctattccatcaatattaactattagaatttgctgtgaaatcaacaaggagaaatatagcatttaataatatgatcctttagggtgaataaacttccagccagaagaccctcagttgccgatctttaaaatatcatttttctatctttctcactaatgtattcagcaccacttcctacaaatatgttgtgtagttttatgtaactattggtagttatctggtgagtctataaatgatcttctcaattaattccaaaggagtttgattgcctctgtagttgacctttcttatttctccatagttgacctttattaggttatttcattcatttactagcttatttcattcatttattcattcaacatagttttattatattcttactttatggctatgcactgtactagggcctaaggattcacaactgaatggggtactgtctctctattgtgaaggtacaccagagtccagtgaaaggttgagatgtttaaacagataatcacaacatcgtagaataagggagattatagatgtgtgaactagtttaaagggaacacagaagaggacactgcaaacttgaacattgcttatacaaaagagaatttgggtcacctgtactttgcaaagaaacatccattatgccaaaagaattggccatcactaaaagctataaaacctgtttctgccattctaatcaagtagttaatgtgaaaaaattcttgaagacatgggttatttaaagagaacttcaaacttttgtaaatttgtaggaggttttgattaaaacttagtttaaggaatgaaagctggctagtgaaaaaggccttttggcatttgttaccaattaatttaaaacatcttagattttaaaagttggatttggaagtcaaatatttcatcactctacttgttggtatgctcctgttgccgtacatttacttatgtttactaaatttccttaaaatttaatgacttacaggtggtctttgctcatatcattcttttcacaaagattgtacgttattaatcagtattcagtacacattccttttaaaatataaatgaagaaaagttatccaatagcagaattaaatcacgattctaattacattttatttcttttacttgagaatgtgatctttcaatagattatattttggtagcacttgacttaaacattaacattgaaaatgtcaactgttaaaactggcatttatctcatctagaaagagataaaataaacaacatcacaagaagtttgaaatagtaacctgtgacataagatttagcttaaaagtgtctttctgatttgttttcttcccctctgaggatacagtgacattttacatttacaaagagaagtttatacaactagaaaatgtaggtgttttattttttcaaatttcataaaatgtagactaacaagtggcaaatatgaatcacatttacaattaatttccagatttagtcctacttttattttttttcatttatttttcaaggtgtttgtcaaaaacttttcttaagtagcctataaactacaggtaggaagaaaatcatttctctctttgttatttctctaatcctccagttttcttaacttctcttaaggtttagttagcaagtatcctatttgaacacaaaccaaatagaaaagtaatagtgacctctggacatcccaccgtatcctctctatcaagcatcatatcaaaataataacatccagagtcttcatttaggctctactgtatatttatataatatgtataatatataataaaaatatcttgaaaattactcattgtcttgaatttataacctaaatgataagaaccccacatacacatatagagaagcatatcaacagagcaaatttagtagaggactttatctttatatttttctataaaagttgggcatttcttattttaagtagggtaagnnnnnnnnnnnnnnnnnnnnnnnnnnnnnnnnnnnnnnnnnnnnnnnnnnnnnnnnnnnnnnnnnnnnnnnnnnnnnnnnnnnnnnnnnnnnnnnnnnnnnnnnnnnnnnnnnnnnnnnnnnnncctcacacttaggatagctattatttgagttgctcccagatgtttatggattaataaaataagaagattcctttaggttcacagcttgagcatttcaagatgagtgtactaaaagataaggcttttcttatgaatttaaagttaggtctatgatccctgcctaagaggttaacaatagacagaggtagataactcatatttggaaaaggtagggagcatgtgttcaggattttttctgctctgttgaaattgccaaaggcaagatctccagggaagaatgataagatccagaaatgacttttcaaaatgtacacaaagaagaagttgaatagaagaaaatagtttgtaggaacagagtggattcatctagttgggagatgctttttaatatgtatatgttacaaaatcttacacacacacatttttctttactaccattttctcatggttagaataagttaacccaaggagataaatttaattgttgtatccttacatttaaattatctcatgtatttgtttacagtatttcagattattcccctttacttgacatgctaccttttaatcagcctgaacttctccatcaattactaactttagtaagaggtcattaccaatacaattctttctagcttgaacttaattgaattatatatttgaaatatcaaaaatatagattttaagagattatacagactaatatataaactattatcacatgtgtattgaaacatcatatttaagtagaagtaaacaaggagaaaatgcatttccagtggttgccaggttttatttattgacttttttgacatacagtgtataaccatctcagataaggaaaactgaaacagctcaggaagatgtgtgtgcacctgcatttgatgcaaaagggtatatttgtgtatgtggtggtggaagcagagtcaacaaacacatttttcattcatttgtaccttcctctaattaactaaagagaatttcctatagatggtttttaaggcaactcaccaagaataaaagaaattttgttctttggttagttttacaaaaaagattcttattaatcacagatagtgtatgatcttgggatagaaaggagagagaagagcagagcatgttgctggaagaagtgaggtggaggtctatcttcctggtataaagacaagctagcattcattccaccagagaaatataaaaggaaccctttaaaatagaaagaaataaaatgtttagggacactccagggaagaaacaaatgtgggaatcattgtattactgtactatttgagtatactgtaggttgccttatgtactttctcaaaattaagtatagtaaaagtctaccaggcattatataaaggcattacatacattctccttttttttttttttttttttttgagatggggtctcactctgtcgcccaggctggagtgcagtggcgcgatctcggctcactgcaacctctgcctcctgagttcaagcgattctcctgtctcagtctcctgagtagctgggattacaggcacacgctgccacacctggctaattttttgtattttagtagacacggggtttcactgtgttggccaggctggtctcgaactcctgagctcaggcaatccaactgcctcagcctcccgaagtgctgggattacaggcatgagccaccatgcctggctgaatgtattctctcttaaaggctaagccacgttttcaatttaatgtcctcagtggacaggccttccagttgctgaatcactatttagctttccctccactaaaattaattatatggctataatcatttctttttcataatactctcctatctattcagttgaactgtttgcaaccgccttttttgtaggtcgtaaatggtcaaatgtaagcagtttcatatggttcaacctgatactttaaaatttcatctctctaaactgatcaagttttagaaccagacctacagtatgtttcttatggattgacagtttacaatttgtatatactacaatctgttttaaatattaagcttttaataatagtaaactgtacagctgtccttgaaagaatgtaggcactaccaatgcagtgaagaggaccctgaaaagtggggcttaggctgggagggttcttggcttagcccagaaaagaattcaagggtaagccagtggtgttcaacagcaacttttattgaagcagcagtgtacagcagcagcagaggtactgctccttatggagcagggataccccataggcattgtgccctgagtaccatctcagaggaagttctgcagtcacatttatacccacttttaattagatgcaaattaaggggcacattatgcagaaatttctaggagaagggtggtaacttctacgtcattgggttgttgctatggaaaggggtggtaacttctgggtgttgccatggcaatggcaaactgacatggcacattggtgggtgtgtcttttagaaaggtgcttccactccatgcctgttttaattagtcctcaatttggtctggtgtctgaaccctgcctccagagtcaagtctcactttgtgagtcaagccctacctcctacctcactactcatctttaaagtctctcataaaaacatgtttggtcttcagatgctctttaatcatggtcacatatgacttattctctgtttttatttgatatttttttctccttagctatattactcaacccttattccttttttttttctttcccaccacctccaatttaatcactgaaacatcaaatcaccttgtaaattcagtggacaagtatcagaatttattatccatgtaggtgaaaacatttaatgcctcagtgataggccccacctcttattgtttcctctggcattgacattataatagcaggatctatgtgaggattctttgttgcctaggtttttgggttgaagacatgcacaattgactcccctgtgtcataatgaagcagcagaattacagccagcaccttgatagatatagaaaaaaaaatgaaatgacagtttttaagtttcttgcctctaacacattttacatcctattgtatgttcttaaacttctcaatattaaagaaaaagctctgcagaaaataagaagactttatttcatgccttgcattccttgatattatatcattttttagaactcagccagcagttactacctcttacaattcagaccaagtttgctccataccatttttgtaggctctctgagattttggggattttattaacggtggtcgaaaatcatggtggacattattcacagtgggaaatacttaattgttattatcatccatgcaatcccttcattcctatgatagtataagaattatttgtaggcttttctgctaattggtgtgtacctcagcattcctattctaaaataaactttgtaataaatgacccttgaaaatgcctatattctctgagatttcacttagtgatatttataaatatttagtgctttgtgacccattggtgagtgtgacataatacacagtgatcaggttattgaatagagtggtagcattcttcagctcctaagcaaacaatgatcttgccattgtttaggtctggtgcacgaggattgtttcagttagcttttgctgcataacaaataacctcaaaacataaaggcttaaaacaacaaccacttacttaacaatttgtggctgggcaattaaggctgagacctactgggcaattttgatcttggctgggctctgtcacattgttggatggctggagaatgaggaaattgccatgtttctattatcatcaagatggcaagaggtcctacagccttccaaagtagaaaaggtgaagtcattcctcttgaggctaggctcagaacctggcatagtttctacttccaccacattctgtcagcctatactagtcataagcctagtcctgattcaagagttgaagaaacagattttatctcttggcaggagaaggtgcaaacttactttgcaaggtggcatgcatatacagggtgggagaggagaattatagccatttttgcattctaccctagaggtctttctcttgtttgtagttagattagtgtgattcctcattcacttaacaatctcttattgtctgaaatacagtaagagatttgtatttcctttgtaaatttccttccttcctttgtaaaaacagtcaactattgatacaggagatgttgtgttggatattatttctattgtactttctaatttgtaaagggcagaacaggaagaataaataaaatctgaggccaagataccttcatacgctcaacaaatatttattaaacttccaccatgtgctgggcactcttaggtgctgaggataaagcagtacaccaaaaagacaaaattcttttcatcatagatcttatattccgaatggtttatatcagtccacaaggtaatgaccatagagtatcagcccttttgtaagcatacacctttgttaacagttttcacctttgtgatttgtaccaccagtagctgctgtcttcattagagtttcctaacacattacaaagacatttgttaatgctggcaaaaatgaaacttctctgcttacatttcattttggtctcaatgtgaatacatgtattttttctgtgaccaccatgttgatgtgctaatatgtttttgtaagacggctaagtagggttaaaggtacagcttgtggttgtggaacaatgctgagttaaccggccctttggagaaatgaccccaagaccttggcttcctttacagcctgttctagccaactgagatccctgccaattaggagggttccctagagagagactccgagagcatcagcataaatttaaattctggacccccaaatgtagtttccaaaagaagcttcttgtcctttgctaattgcaaagtaaatatttctccagcaaaaagacactccctcctttcatgctcctgttctccttcccatctccctaatacagtcactccttaaaactgctagtgttgccgaaacctctttgacataggggacaccccacatttgaaggcacaaagaattattctttccatagataattatcttgctttttatatcctccagcagcttcttcatagaagcattacagactaactttgtagatgtcatagtctgcagaaaggagttgatgccttatccttgggcctctcaagaggtgtgagtaagtaggctattattagcatgacaaaatgtatagaaatgaaaattcttcaaaacctcttaatccactttgttctcactctcttctacatgcccttctctttctatttaatttcctactcagttccttacctttcatttaaaacatcccatttctcaggtcccaaattagaaatactttcctaaaatttttctgtttttcagtttctctaaaaaattatttacgacatacttattactttaatagcaaaataatatattagcatgttatctctcaatgatagtcctttttcaccaagctcactgttctgccctctgtattctgcaggacattgtagttgaaaatgacagatctcaaattatcttaggcaagaagaaaattattggcttaaacgcagactgcactaagtcctcaaacaatatcactttatcacaatatcactgcatcgccttctgctctctccctttctcaccatttcagctcacactgccttcattcctcattgtttgtcggccttattctcctctgctgcagagtctttctccatttaggaggaaagctggctctgggcagctccaagtctatatatccacattgctccaaataaaaaaggatagtgctctcgctctctctttcagtatccctgcatccaatctcacgaaaggattccaatggaccctactttgaatcactgtggcagaggaattggggtcctgagattggtctgtgtaagtaaaatgcctgcagttgaagccagggtcaagtgagccattttgattgctggctctgtttagaaaacaagggtactgacaaaaacacaacagatgtaaatcatctcccatctctccccaccaaacaagaaacaaaacttaccaaatctagaaacgtatgtttttctacaagataatcccttttcaatactggttttgaaaataattttaagtgaggaagagtaaccaaagttttttctgtctatttcagactaaacacacgttcaggataatgctaagaatattttaactatttttttctagtttctctgcatttgctagaaactttttttttgggagtaaactggctttaaatgaatagaaaaaataatctactatgcatatgaatggtttctggaattgaattgtgcaggcttaagtaaagacatgtccatgtccatttctagctgctgagggttctgtgtgaaatgcaccagtgtgggcaatgaccttttgcttgattatgcacaaggccactgaaacgttaaaattaactctaacctaattactgaactgcggtgtttatattgtgtatacaccaccaggtcataactctagcctctgtgagccccagctgccataattgagaaatatgccttgcaaatggttgttttgtttacttgttttttctgctggaagagcttgcttttcctatttttgcaaagaaacagatgtagggaagagtttctgaataaagtttaattacattttatatctcaatgcaaaacatgtacatctgtaagtgagatattccttttacttttgcgttacataaaatgtaatatctgaaagcacaatgccacttactattcacttttttgagtaatagcacattttaggtaaggaaatatcaatatactaaattcacatgcagaaaatatgaatagttgctaattccaaaaataaaagatatagaaaatatgtgcatacttaggatcaagagttaatatctaattaattataactcatgaacaaaaattattgtcttcacagaaataagaacctaggttttcataatgtaattagtagaatacaatttagatggctaattatttcttatggaatatgtacatatgatagtaaaatatttctcagaataataagtacaattgtaaacatctgctatgctgcttatctgttttccagccaacagcaaaatcatgaagggattttgttttatttcaaatttggtttgtctcaacagctaagatacagttactaaagtatttcattggcaaacctgtagtggcttcacatttgtctagtttgtcaaggtcttgaaatgtataagacaagggagtttttaaatttaacttctctccatcagtcccttggctttctaccatgttttataccttttatgcccttcctcctaccttgtcaccctttccttccatctcagcagatttcttcaattttgaattaaaattatctgctcatagaataactgtttcttctcatgttcatcatcttcaaaaactaatatttaatatttgcagtgtcagcctagtgaactaagaaagtattgaaatagtttaaaaaccagaaccatctcagttaagctacagatttgttatttgttttattcatttctttgtttggcttacacaaaagctgtatttttaatatcaataatgatgtgcatgctcttgtaaaaacacaaaagcctaaaagatacataaataaaaaattaataatctcactctccctcagtccagtccttcctctgagaaaagcaatgtgaaagtgggttgtatattcttccacattaatcttctgcttatagaaatagacatataaaaaatttccatagagaatgaatatattattttctttataaaaagcatttgacttttctttctgtgtctacagaaaaagaataaattgtgcaccttagtagctcaatagtgtgtgcatgtttacttgtgtcattttaaaatttgcatatcatggacgtctttctaattcatctttttaatagctgcaaaatgttacatgctatgaatatcacataatgtattcaaccattctgctattgatggattgtaaaattgtttcccatttttttgctcttcttactgtaacaaaaatctctatcatgttaatgaattgatacattgactttctatcagaggaaaaggaggtgatgcatcttagaatttagagcacaggctttggaaccatgtggtttcaaatttcagttgtgctttttaactatcgctatgactttaagcaaattctttagcctttacatatcccatttttcctcatctgtacaatggggatgataacactaactacattacaaagttgtagtgaggagttatgagtatgtataaaactttcagacttgtgcctggcacagagtaagcactcaataattgtgagatctaatattaaatgtagtctcaaacatttgatggataaaccaaagatgtgaatattttaaatattaatatattctgccagattatttttcaaaaaggtgtttcagttcacacgtggaatatatcaaaattacgtgtttcctcatatcctgactctaactgcatgttattagtcctttaaactcttgccaatctgattgacaaatggtattctattgttttattgacattttcctattaataaggctaatctcatgtttagagcctatttgaatttccacaggatgcctatttatatgttttatccaattttctaatttttctattaagtaaaacaccacttaataggaattatttgtatattagagattaaccttttgtcatgtgcatagcaaatatttttcttattctagtattaacttgactataatgtgttttgcttttctttttttatattactgatatacttgaattagtttatttttttccctcaacttttattttaagttccggggtacatgtgcaggatgtgcaggtttgttacataggtaaacatgtgccatggtggtttgctgcacagatcgtcccatcacctattaagcccagcatccattaattattcttcctgatgctctcccttcccctggccccaacaggtaccagtgtgtgttgttttccctcgtgtgtccatgcgttctcatcgttcagctcccatttgtgagaacatgcagtgttttgttttctggtcctgtgttagtttgctgaggataacagcttccacatccattcatatccctgtaaaggacatgatccgattcccttttatggctgcataatattccatggtgtatatgtgccacattttcttaatccagtctatcattgatcaccatttgggttgattccatgtctatgctattgtgactagtgctgcagtgaacatatgaatgcatgtagctttataatagaatgattttttttattattatactttaagttctagggtacatgtgcacaacatgcaggtttgttacatatgtatacatgtgccatgttggtgtgctgcacccattaactcgtcatttacattaggtttatctcctaatgctatccctcccccatccccccatcccacaacaggccccggtgtgtgatgttccccttccagtgtccaagtgttctcattgttcaattcccacctatgagtgagaacatgcggtgtttggttttttgtcctcatgatagtttgctgagaatgatggtttccagcttcatccatgtccctacaaaggacatgaactcatccttttttatggctgcatagtattccatggtgtatatgtgccacattttcttaatccagtctgtcattattgggttggttccaagtctttgcaattgtgaatagtgctgcaataaacatacatgtgaatatgtctttatagcagcatgatgtataatcctttgggtatatacccagtaatgggatggctgggtcaaatggtatttctagttctagatccttgaggaatcgccacactgtcttccagaatggttgaactagtttacagtcccaccaacagtgtaaaagtgttcctatttctccacatcctctccagcacctgttgtttcctgacttattaatgatcaccattctaactggtgtgagatggtttctcattgtggttttgatttgcatttctctgatggccagtgatgatgagcattttttcatgtgtctgttggcgcataaatgtcttcttttttgcccactttttgatggggttgtttgactttttcttgtaaatttatttatgttctttgtacattctggatattagccctttttcaaatgggtagattgcaaaaattttctcccattctgtaggttattcactctgatggtagtttcttttgctgtgcagaagctctttagtttaattagatcccatttgtcaattttgggttttgttgccattgcttttggtgttttagacatgaagtccttgcctatgcctatgtcctgaatggtattgcctaggttttcttctagggtttttatggttttaggtctgacatttaagtctttaatccatcttgaattaatttttgtataaggtgtaagaaagggatccagtttcagctttctacatatggctagccagttttcccagcaccatttattaaatagggaatcctttccccatttcttgtttttgtcaggtttttcaaagatcagatggttatagatgtgtggtattatttctgagggctctgttctgttccattggtctatatctctgttttggtacgaggaccatgctgttttggttactgtagccttgtagtatagtttgaagtcaggtagcatgatgtatattcctttgtgtatttacccagtaatgggattgctgggtcaaatggtatttctgcctttagatctttgaggaatcgccacacttacttccacaatggttgaactaatttaccctcccaccaaccatgtagaagtgtttctttttctccacaacctcaccagcatctgggttttttttttctgtttggttttttgttttattttgctttgtttttgtaattacaacttctccttctcagatgctgattttaataaaaattgttagatactgcaatcttacatgtgtgggtattcattcacaaacattataggtgacagttgtgtgccagacatagtgctaggcacactagggtaaatatatttgcatgtacatatgatcataggtatgtataagctatcttgtcctatatccctcctaaactcttctgcctgtgctgatgtaattaagaagacttatgttagaactaattctagatttcttcctcttatgtaggaataacaaaacataaaacatcagaataagtcaaaaagtaccttggagatgcatacttcaccattcttttttgcaataaacaacacgaaagagttaaagtgactttgcagaagtgacattatcacaaagctggtaatgacagaaaagaaatgtgaatcccagtgcattatagtttccactgtatcataaggctttatggacacaatattttgtgaagtattgtttaccatgaactgtgttgacggtgttaattcaatttgtggagctatccacatatttaataatatatcaccatactaactgtgcttacttgcttcttttgttttttttaatcacttcttagggtcttatttttaagcagcaaggggagccacctacttgagccactctcccctgctgcaatggaaaacagtctcccttcaataaaatggctattctagcactttgttctcactgtctgatgtggcttggggccaggtattctgtaaagcagatttgagcattagactaagagagttatcctcagaaaggtgttctgagaaggtctgccaaaaaagttgaggcttaaaaaaaaatgtaagtaggagtaggaagaggagacttttagtgggcatttgactgggtcttgctttcctcctggtaatagattgcttggctatctacagatgcttacaagatgagaaaattggagtagaaaaaaattgttttaaaatggattttagcaacagaaccctctgctctgttgaaattgcatgtagagcccaatttatacaatggataaaaaatagatgtgccttattgttggcaaagatgtgggaaaagttggaactatcatgcactattgatgggaatgtaaaatagtacagccagccactatgaaaacagcatggtggttccacacatacacacacacacacacacaaatatacatatatatataaagttatacatatatatataattaccatataatccagcaatttcatttgagcgtatacccaaatgaattgaaaatagaatctcaaagagatagttttacacccatgttcatagcagcattatttacaatagctaaaagttggggtggcagcaactacagtgttcattgatggatgaatagattaaacaaattgtgatatatacatacaatgagatattattgtctttaagaaggaagaaaattctaactcacgccacagcatagataaaccttaaagactttatactaagtaacttcaaagagttacaaaatggcaaatactatatgattttacttatatgaagtacctaaagtagcaagttaatagaataaaaagtaaaatgatagttgccaggaggtaaggaaggctaaatggtgagtgattatttaatggatacagacttttcaaattttggaagatgaaaagagttctgaagatggatgctggtgatggctatacaacagtgtgaatgtacttaatgccactgaactgtacacttaaaaatggttaaggtagttatgtgttttttaccccaatttaaaataaaataaaaataaactaagtgcctctattgaagtaaggtctagccaaccagtagctctataccaaagtactgtattttaaaactgttgaacaagatgttttctaaaacctcttttatatttttcagttataatcatggtaaaatctgtatttgacattcctgtggactttttgctacagaaaagcacagtatttttttcttaggaaaattgcttgactctcagaaggaaaaatatatcagtgtgctccccaaggcattgtgcagaggttatatcagatgtcttggagtccattatgctgtagctgtaggatgttgtagggtagcaagaaataagtaactttgagaagtggctctcatgatatactaacatgctgggctttgtatttctttctttctaggttttctcctcaagtttgcattcatttatactaacttatagaaacatcccttccacatttgtcattatgactatagtaaaactatggaaaacaaagatgaaactgtaacattcctaaaacatatactgtatacataacctttagcttgttgtaatgtttaacacacgacactgtatcactttaaacaacatctcttcctcttatttgtcccatctaatcctctggcataatgtttttttcatgatttctgtcatttatccttcctctttttgattgctaaatacataatctaaaatgttaggttgcaaactagcttcaaattggctaggagcttgggagaactactctgaaaactttttatataaactctaaggaggtcaaattcagaaaaatctcagctgctggacttggatcccattaaccactgatcatttataattaatattaataaatggcagatgacacatgtatattgcttaactaaaaatgtgtgtgtagtattaaattttttaaaagttagttaagacccagaggacctgaatatatgtattggaataatgaaaagaacaaaactaccaacatgtgatctagtatcttctaactacaagcacctaaagttccagaggaaacagaagtacttttaattcatcatattacatattgtattgccatgaaactctatacctttacactgaaatgcctgtttcacaagcctatattaatctggacaattggcttattaatcattatagatatacagatataaatatatatatataatatatacacaaacacacacatacagacacctgttaatttcctagtctaaaaccaaattgtttaatacatatggtttttataatcagaaatttaaaaaaatatccaaatgctgagttgctttaaatcctaatgttccatagagccccactaaataatataacagctggaagggatttattcatctctggacactaaggagttagggcacagtagttcagttacctggttatataattctgggaacctatacaatgattaaaatggaaatgagacctccagttactgcaatgaaggtaaatggttttccaggggaattacacttggactcaaaatcaccttacaaaaagccaaaagacagaaacatgtattcgcttgggctatatgtccttattcaaccatatccattaccataaccatattaacatagattctttctgattggactgtgatttaataataatattatttgtttaaatgttggcaattttacataattatctcatttaaaattctttaaatattgcaggcatatatgcattattattatcgactgcattttaaagatgaggaaattgaggctttgagtgtgagtagtagatttcacactcaaagaccaggactcacactcagacctaattctgagtccagtgatatttcaagtatttgaggctgaaaagagtatataactaccttaagaatgtcagttaataagcaagttagtcagtactagaacctaaatcttttgtcaatctgatctttccattctgtctttttcaacacttttgccctgtgttcaagaggatcatttatttctaatcatctgctcttttctaactatacttatcacacatgaggcttagcatcaaccattatttcttattaatgatattatcattgttgaaaaaattgaaaacctctttttaccaccaaatctgcttcatctttctgtttacaaccattttgttattcaaataacaaacttaactataataagcaaattggccagtgatttccccttttgcttcaaatcattctgatgttttaaagccaaatagttttcacaaattgccaacattgtattcaaatgcactaaatggttatgttagtgctatcatgttgtctaaacaaaggcgctgtcagtcagtagagtcagtgaccttcaggctgttaagtggtttgtgcaattttcacaggattatgcttaaatataaatcctaataaagaatctcacttggctttttaaaaggttgttaaaattaatacttaatccaattcctataaaataatattgaagacataaagtaaaatttactaaaaaaaatgtatttcaaaggtttggattttctactcaatttatgaagcatatatggtctcctaaatgctgtgtgaatcattggacatgccagacatgaagcaaacttcccaccccaggaggcttctcagcctgaagcaagctgtaagtgggtagagttccaagagggaacacaacgtgcatgtgcgaggaaagcagatgcagcatgactttgggtttgttctttgggaacacacaactatatggaaaaatacatgctgctcccaattgctgtagacatctgctgaaggcacgtgagattgagactagggaatggtacagaatttctcctagaatattgtagtttaactttggaagcaaggggaattggctgttaaccgaataagagtttcattctaacatgaaaattgtacagcgtgctcattcgtgtgggcgcacagagggcgttaagctatttctttataaaaatatgggaacattgatttcctttagcagtattatttgatatctatttacagtttagttgggttgtcaaacatcagtgcatttctaataacatgtgtgtttgtgataccttgctcgtggcaaaggcttaaaaatttaaaaaggctttgaaatactttttaggcatgaaattgagctcacaaaataagcttaatggcaaattagtcaggaacacatggatatgtttcctttaatttgtatacagattttcagaattaagatgtggtaaaacctactagcagtctattaagccttctaaggcacttgcaacataattagagatttgcaaattcaaggttggcctaatagaaaaacgaacaaatttgtgtttgcattttagcattgcctgagtatttttacaaacacttcatttagcataattttgaaatggtggatatgttctgatcagaggactaagcagtatgaagaaagcaaaagaaacatgtttttaaaatcagggtaatagatacattaagaaactgcttctgtgctagcttttattttgttaccattgtcctatgggaagatgaggactataatttttcaagttgacctccctgccaccatattctctagagccactagaatggaactagtcttactctgttttcctcaaagatttaagtgtatgtgtgctacacaattatttaacacttcaataataaaataattgaaagtaattgtatggagtcatagaactgaacatagtcaccaacacatttttttaaagtattttatggtctatttgtgtttcttttcagtgatataagagattttcatttgaagtacccatgaaagttttcttagggcagttcaaagggaagtctgacagaaagagtgtttaggttgatgaagaagctttctacccttgggcagctttatcttaaactttaaactaaccatggaatcatatgagtgaggaactcttagacttctttcatttatatccctgactttaagcatagatgcatgaaaatttatttgattttaagacttcttagtgaatggattttcaaccttacttcaatgcaaaaacgtgattttccccagcttatcaaaagctttcaatgctcattctctttacattcaataattcatttgtctcctaatgtatacattttcccaaattaaaaatattcatttatattttttcctgtatttgcccttttgtctgtcttaagttggcccatttgttttattttggttatttgtctaacttagaaaatagaattcctttattgaatataaagtcccaaagcatgttacttagtttgtgtttcaatattcagcatcttgcggaatattgaaaaccagtaagtaagagctttgctagtttcaattacagaacatgtttgaaaaacatgcagttgtgttaccttcttcagtggtggcatatggttaatctaccaccaccaagtggaaattgggtaggtgactacttcagttatcaaataatactgcctggtaacatcaattttgttcgtatatgagcataaagtactggaaaactttatacttttggatcatttaaatgcatctaaaaatcatagtttgtttcaatattaatttgcttaagaaatcctttttctccctgtcaacattgcagaggccaattttagcacagttgtgacagttccttctaactcataaattacaaattgatggccttaaactgattttgttgttactcagcctcatttctgcatcttaagactggtctcatcctgaaaactagtaagaagagatctaatatcaaacctggatattcttaaagactggattatttaagactcgttcaccaaattttctaataccagtaaatggggacacattatattgaataagggtattgttagccaaattctaagattcatcttaaattgttttcttataagaattgtgtatttaccattttaaaaatcactattattttaaaacacttagaaagtgaacatttgaaaatgatgtgcctttggatgctctgtaatgttaagcagatccagacataaagacaaaagtaaattccagagtatttttgtagccatggaatcaccataaaaaggggtttttgaccccaatgttaccgtaacattgtcttcagcatttcatatttaattacagtagattactcaccaatataataaatatagatttatgagatactttaatgttctaaaacaaatgaaaaccacccaagaggagcctcaccaaacctgaggttgtccagattgcattgactaagattaagtaaaagatcattcatctccagaggtcatgcaattaatctcagagtgggagttaaagcaatgactaagcagaaaaggaagccaaatacaagctcgtaacaaaaggtgctggggctccaacatcaaggaacttgttatttcctttttatttatttatttttttttaatagacctaaaacactcattccttactactggtttctttgggtcctaaaattccacttggttaggtcagctattttccatgactatttttgatacggtcaaacaaatacaaagaataagcttttaaaaaactacagtgggttttcatgtctaggaaaacaacatgacacttcattttatgtgtcaacagaaagtaatttaggatgaatgtataataatccagggtttgaacaatgaaaaagctcaagatacactttaaggaagacatattctactccagggttttataattatttaaattcaaataaaatcaaagttcatcttcacttaacttaggtacctgatacctgttgcaaaatattgaggaaaatgtttggctgtcattccttgaagctgaatctttatacccttgcttgataatccctcaattccctgtggcagcaaatttttatttctagtaaacacaacttgttttttccttcaccttattgagattcaaaaccttgtgttttaaaccaagaataattttgaacttggtcgttccttattgcaaggacttcctccaactagggtgaattttcacccacgattagcctgcctttggagtttatgatgtgaagtgccacagctgatggcccatgaaagagactgctaagtctattgctcacatcaatattcccgctggatattttgctcattccttgggaatttcaaagaataacaaataaccaacaaatcatcaaaaactgtaacatgttacccaattcttgggaataagccagtgagactaaaatctgcttaagtatcacaaatgtgaattcccagcatttcaagcttgtaaactgtatccaacactcaccaatgtctattccatttcttagctgtacagaaggggcacattcatctggtaactgtcaacaatgaggttccttccttcttgaacccagctggccatacaagcaggcaggagttgcatgtttgaccctgagacagcaaagggtattgccctgttgggaagacaacaggattgcgatgtaatctggaatcaatttgagattagcaccagatgctccatgccagtaataagtgctgatcataagacttaattttgtatgctattagaattaatgataaggtataagcatagtatgtcccaaactataggaatgaataagagcagagtgaaaaactgaaatggtaaaacaagaatagaagttttaaaataggtaaattgaaaatatttgtttactttattttcatagcttgagtaaaagagttggaagacaaaggagaaaaggacttgcaagaagccaatttttttttttatgaatgtgtttgtttttcctcaaaagtcagtcgtaaatgctcttcagggaagggagtcagagagagccaaatagtggtcttaaagttttgtttgtgttattatagttctcttggttttttttttacaaaaagagaatggtgaaataacttttgtcacgttagtattagtctcataatcagtggaacacagtccttttttgagtcattcctgaaatagaaatgagcatgaaatgagcctggtattcattgaatattaataggtacatttagatgcatgtctaggactgtgcagtatatgagagatcctttactagtcatcttgaatttaaatattgaaatggtaactaattatatttcactgtatacacttttaaatagtagattatatattatagttggtaaggggaaacatattgtattatttggctggacaacagctaatagtatcacagacaactccttgagattctctaagttctacacataagcttcttaattaccaaactcataacagaatatgtgtcttgaagcagctttgagtcctattttttatataattataaaaatagaagtcaggttaaaaaatgattaatattggtgcaaaaatggttttaggtatcccttcaaagattctcctaaaatgatttgtaatctggcaaataaaaatattctccatgctataaatatgctcagtaataagtcagaaatagaatatcaatttctgtgaattttcaaagaaaaacatgctgggttaagggccaacatcatataacatttattgctttgtattacattatacacacacaaacacacacatgttttgtgaacttttataaatggaatcaataaaaatatgtgtatataaaatatattgttctagatatgaactatatttttatattatacttcaaaaatatgaaaatattgctgagaaaggaccatctgtgtcttctcacatctaacttttcttgattatttctaggaaagcagactaaacacacagttctgacataatacagcatcccattttgatttctggttagctcagaaggctttaccagccaaagaaagtctctgaaaagggcaaacctttctgacctcaggaggttctgataggaagaactgaagcggtgaacacccagaggagagaaaacatgggaataaattccccaaagttctgtaaccacagtgatgtgggtgcatagaggaagacataatttcattcttaaagaatgtccctgttttcacattctttcatttgtcttaaagttgatcttgcagatgatatagtccagatgaatttctgcttaataagaattcttgttcacaaattgacagaaaaatataccaaccatatatgtaaaaacacagtggagaatacccaagcataccataatacctttctcataattcagctaataatctatcagatcatttttaggaaaaggaaatttttgcttcttacaataattagattgagagtagagaattagattgagagtagaggtataaactcgtaataaaaattagaatgtggtttctttctgatgctccgcttcctttgatttattagtttgcatcttatcaataaattcaccttatccaaatttgctggaacaaagttttcaaaaaggaaattaaggctcttatgtgctaatattctgtgtagacaaattagatgctgctcataaccaaaacgatctcatttagtttactctagaacatttgaatagtgggatgagggtctttaaaactgttttggacatgtgaactgaaatataagaaaaccattacaaagttgggtttgtattagttttttgttgctgtcatcataaattaccaaaaacttagtgtcctaaatgacacaaatttattatcttacaattctgtaggtgagaaggttgacacaagttttaccatgctaaaatcaaggcatcagtaaggctgtgttcctttttggcaactctagggtagaatccacttacttgtcttttccagattttacaggctgctcacaatccttggttcatggcccctttctccagcctcaaagcctcaagtggcaggttgagtccttttcacacagcatctctctgacacactcttcagcctcttcttccactttccacttttaaggactcatgtaattaaatggaccaatctggataattccagataatctctgcatctcatggtcagctgattagctagatgctagaagtgaaaataacaaagatatgcaaatatgtatgagactcctttggaagttcataatttcatgggagaattggttgtaaacaaataaatgcaaaattgacagatgtgtcctctggaaatagaggagataaattattattggctcttaaaggccaagtagaattttccagctaaagagaaggagaggaactttccattgagaagcaacatcaataaaatcacaaaagcaagaaagagcatgatgtgatcaaattatagttaactatgtagtgtgactgagcaaaggcaaattagggaaggaggtgctgttcaataacataaccaagagtcagattcagaagggccttctaaaccatgccaagaactttgggagtacaggcactgggcagatttaaaaacaaacaaaaaaccaacaggaataaaagaccagccctctgcactataagaaggtaacctgacagcaaagtggaaaatatctggaagaaaacaaaaaaaaaaaaaaaaaaaaaaaaaaaaccaccagatctttgcaaaaatcattctagaggttctagagatgacagaggtttgaactgaatgaggataaagaaggaatgacacatttgagagatatgcaagaagtaaggcagatggccttgagtgggttaacaactttcatcaaacatcttaaaggaattaagtgctcctcagattttacccaaaccagattaaggctgttctattattaagggtgagttgattcactcagctgttttatagtttcatagagaccatttattatcgttactaattatttttattttagggattataattttagaattcttttcattttcaactacttatatatcatttgtttctcatacctaccccaaataatgagaatagtaggaattattgattctattttataaatgaggcaaacaaagcacagaaagtgctttacttaaggtcatattgctgatgagtaatatagccaagtttaaaatgcacgtttcctgatacctatttcagatatttaaaatttaatgtcccactttttttaagcacacattttaaaagatgaggtcttgagagtttaagtaatatcccccaaagatagactatgactaaatagcttgacagaaaatcaaactcagatctttctaacttcaaagcccaaggtcatagcagctatacattactgcatccctcctcacctgctggagaagatcagggaagaattaatagagaagtagcctttaaaatgtatcttgaatgatgtatgtaggtaaggggtgatcttcaagatacttaaaaactatacagtaaaatatacaaatacagtaccccatatataaatatgttaaatatattatcatacatagataatacagctgcttaccaggtgttgttagcagtagtgcaaatcatttgtgaggttattcagtgatgcctgaaaagagttgctaatttttagaaatcacccggtattgttttcagtttgttagggttgattcacacacccacacccagacccattcatactcagggaaggcttcctcagagacattttgtgcttaactccttaaatcctctgcagtttaaaagttccagcagaccttgcaggatccaaaagtgtgcttgattaagggtgggcaagatgtaatggacaaaaaagggattcaccttcctctccccaaattctgacataagagataaacaagtaagccaaccttacttctgctttccttcagtattttcactccccaatatttgaagtcacttcttgactactactctttctcctaaatattctctggagataagggaatggcttatatacagtcattgatcacgtatccccgtttctacctgtctcagtacatttttgtattgctataacagaatacctaaggctgggtaattcattcaaaaaagagtttatttggctaacagttctgcaggctgtacaagaagcatggcaccagtatctgactctggtgagggcctcaggctgcttccactcatgacagaaggaaaggggaactggcacgtgcagatcatatgactagagaagaaaagagagagtgtgtgagagaatggagagagagagaaggtgccaggctctttttaacaagcagctctctgggaaactctcctaggaactaatatagagtgagaactcactcattaccatgagaatggcaccaagtcattcatgagggacccactccaatgactcccaaacacctcccatttggccccaccccaaacatttgcgctcaaatttcaacatgacatttgcagggtcaaatatctaaactatagcattaccttaactaggtcttaaggtatatatgaagtttactttgctcagaaaataaaaaccaaacatatgggctatttcaagctctttacccctttaaaacttttttctatctatttcatctggccttcttttttccagggtcactttatttcgttcttaaatacttcaattaaatgagaaatatttattttagagattaagacagtgttcttagagattgagtaagacagtgttcattctttcaggaattgtcacatttcctttaattttcagctcatttgcttaagcctttcctgagactttctcttcccattaattgcattgcacataacatctgctgtccttgctacaccctcttaaatggaaagtttcatcatactacccagtggtccattttggtggcattccactgaaagaaaaattcaatggattacaacaaaagccacagttattcgaaactcaaggggaagtcaggcttctgagactgtgtagtgccacttcaaaagaggatacaaaagccccaagatcaggcaagatgggctagaatcatatttcatgactttaaaggaagactacattctcaactccaccaaataaagcatcatttatgcttgctatagaagataattaaggaagacaaggttattttgtcatctttcaacttttgacaaccatcccaagtgctttcctctcttcctctatttctcttgttatttgttcctcttcctgaccacctctttttctccaaacaatcgcaaaaactttttggtagaccactgttttccagctttgggctgagagatggactctgatccacactcccaacctcagggaaactctgaagtcttcaaatcactaaaactgtcctagaactcaaatgccttctggaaacaagagaatggaattctttctaacttctctgttccaacctggacttcctaatgccatttcttgaaacagctttagggatactctagttattcatcattgacttggtcccaaaggaccaagcatgacaagtcaaaatgatattcctgaaaacatgatatagctctctggagttcactgtaatctcttgaagctgatattggaacagaagtagctaactggctgagtactctataataagtgggacttattaagacaggttgtttgggacactgggtaatcacagcatgcccgcatatgagagagtaacaccaaagcatctctgtctatgcctgtccttctccaactctaactcgaattaagtcacagccatgaaatcaagaaaagggaacaatatttatctttttcatttaattcattcaacgaatatttatagactcactacagttctcaggctcttgccaaagagaaaggagctaccacagcctttagagcaatagtagcagtgcttactaatataccaggaatatcggccttacatgtctccccttgtgcacaaaattatgcaagtaaatcagggaatcactgctagaatctcccaatactatccaccccacctgtattagtgcattctcacactattaataaagacataaccgagactgggtaatttataaaggaaacaggtttaattgactcacagttcagcatggcctcaagaaacttacaatcatgatggaaagggaagcaaatgcatccttcatatggcggaaggaagagaagtgccaagaaaaagggggaaaagccccttataaaaccatcaaatctcatgagaactcactcactattacgagaacagcatgagggtaaccacccctggaattcaattacctcccactgggtccatcccaccacacatggggattataggaactataattcaaggtaagatttgggtagggaagcaggcaaaccatataaccaccctactccaaaataatcagtcctgtgaattgcatttccttttcaatactttgataggtaaataaaaattaaggttgaatttctataaagagtaagttctttatatttgtagttgttactacattaattgttcttcctaatattatgaaaactggaaacaaaattcaatatcaccttgacaaattgcaaaaaggcctagaaatatgaattaaaattagtagatgatatactgggttgcacatagggacccaatcaaacaatagaaggaaacacactagttagtagcaaaggaagaggagtgaaatctactaatgataacgttaatgttgggagggaaagtctatgcataggaggttgactatccaaagaatgaaagtaattatttgatttcttctgcattaatcagatgcttattagaaagccatattctattttcctcaggacattctgaaagtttgtgaagagaaaaagtagatagggtacaagtcttaatatgctacatggaaaatatggttgataagaaaaagttaaaagtcatataagttacagaaatcactaaatttaaagattcaaatttctaaagagctcttgtgaaaggatgacactctcttcagaatcattaaaaattacactggaaaaccggctgtcttggaattgatacttaaaattcaccccaaaaatagaacttttccatcagtggtggaaagggacctataaataaatatgtgcatatacatttatatataaaaaatatatacacacacaaacatacatacacatttgttccccaggtctatacttccaaacctaccctcatcaataatgatagagaaagcacagtgaaaagctgtaaaataggtacagtaaaatcttactaatcttgctaaattacagggtggatatttctagattagttaacacttaacctccaaacaaattttaaagatgattaaatcagttgtattcccctccaagtcctatatgtaaccattattgatgaagtaattacaaggacctatcttgatgattgtggaaatggatgttgaaagtatttctgattaagaacagacaattgcttcaacaaatagaatgggagaaaaagtacctagaacaatctgcattacctgctataggtgaaatactccccttatcatatattatgggtaaagtttatcacaaattttaatgtagtagaggttgagtggggttttctatgtttttcaaactagttaagaaaccagtagtttgaagcaaaatctgcaacaaaagaagaatgagtaagatcctgaagcatagtgaaaccatttaagaacgtatttgaagatgcatgaaaatcatctttacatatgtagctaataaagagctgaaaacattaaaccatcactataaacatttatattatctgtagctaaaattgcatggagtgagacacatgatacgtggagcagcacaaataagaaactgggtagtcatttttccccacatgatgcaattccagattaaaggtacatttttcccccatagaccaataaaaagcttcagagaaagacatagtgggctgtgttagaatgagaattagacagcacagtcaactagtgcataacatgatgaaagagtagaatactatcaagatttcttgtataatcaatcacagcaaacatgtcagcaagtatgaggccatccgctcctgtccatacaacccagtagacaatttgggtaagggaatgagtatagcagtgccaaatgtggctatcaacacttcttctgtttctgtctcaaaagaacaaaattctaagacaagctcttagaacaaatggaaatttatccaaataaaaatcaaatgataaatgcccagagaatattctttctttggaattcgttcaattctttaatttaaccagctggaataaattttcaagtagcattctgctcagccttttgaaatgaaggacttttctgttaattggaaagttatattccatcaaagatgaagacagtgatcttgccttagtgattcttagaaaaaataaaaggcatttggtgaatatttatcatatactgattccagaacatgtattttaagcacaaatgaatgagctgtgggcctacacatttaactaaagaaaaatagggaaaattcaaatacaagttttattttaaactctacataaaagctaactttcactatgctcagtcatgagaggaatatgtaaagagaaaatagaaatagaaaccattaattttgagaatgaaagatggataatacagctgtggttcctgattttctgaagcaaatgaattagataagtcaacacatttaagtgttctttactgtgttactggaatatgtgttattggggctggggaaacatgagagtcaactcaaaaagatctacagcaagaaaataaaaatttactgggaaaaaattattttgaaaattcatatttttaaagcaatctgtaccataggcagtactttaaacttagtcattgattatagatatattaaataacattgttacatttaaattttaaattggcacgttaggcaaactaatttatcgcaaataatgtgaaaagttgtttaaaaattaatgatagtcaagtactaaagaaataatttttccagatgtcttaaaggaatcactggatagatggtctgaattataattgtgtattctgatttaaaataattttataggaagacttctaggtaatactatttatgtactttcagtctggcaatgtgtgtataacagaaatttttcaaagaggctgttccacttttttaaatatttaaattgctgagagaactttttaaagggtaatatgaaataaatatttaataagttccatagactcacgcatattctccagcttgagatggaagatggtggttgaagcagcagggggcgccagcgggcatggtggtgagatggggacagggtagagtacgagtgttacaaaaaaaagatgaacacatcaattcgtttttgagatagtcactaatattttgagaggactaggtccaaattgaaaatttgggatagaacacgacaatgttgttaggcaggctttaatggtctttgaaatattagtgttaggacgccccactgactaaatttctgaagataggtaataaaattcccatattataagctcataaacattatataaaacaaccaaagtatcctattcagggtcatttttttaagggaacaataatattcatccaacaagctagtcatgaatttcacggcaaaagtaatgaataatatttgacggtgcttaatagatgaaatttgccaacataccctttgataacaagtaagaatgagaataaatttatatgcttatttaatagatacaattatttaaaacccaagatctaattcaaaatgtgttatgcaaacatgcttagatcaagaaattgtctacatgtaagtcaatgtatctgatttactttccaagagttttatgatctatcctaaggtgatagataggatttcaaagtcaagataacaacttctgctctgaagaaaaaattacttattgtaaatgaacttttaaccaaaaagcagttgatacaagagaaataaacccatacaaaagaatgcaaaatctaaaatatttaatataaattataataccctgctagcttttaaaatattatacaataaaatacagaatatcctttacttttataatgagtaaaattcgtaaacattgccaatatttttaaaaatctttgggtactttctcccctgatcacttttaactgttcttttaacatagaacaggaaggcatcctagtatgcaatacccagtgcctttaatagtttcttttggactccagctaatggcccttttaaatggaagcaaggattccaggctggggttccaggcagcagaagcaatgaggtggaatggagttagcttgaatgaaagggttatggaaacctctgtcacgacattgagccaacattcaaaatttcagattctgagtctttagtggataataaaattatttaaacaacagagaaaaaaatttgtaaaggcctattggcaatggtccatttgtaaggaaggtatttaattaggcaaaagagagtttattatgcttaaagcagactatgaaaatacacattctaaaaagttgtgattactgatatttatgatgtctgctataaggtgaaatgatttataataggactgcattcaaacctcaagtagcattttaaaattttaaagctatataatttttctttctcttttttagtattaagtataacaaaatatgaaaatatgtgataatttcattaaagcttcaaaaatgtaacagtagtagtctaatggaaaattatttctaaattagatataaatgatgtataattttcaagttacatatatatatatatatatcatacctctatatgttgggggagtggaaatactaaaatataggcttgtagcaaaaataaaaagaaagagaatagagaatgagatagtgctgaatggtgctgactcaaaaagtttattccaaatgctattaagttctgagttaatttctgataagcagcttttccttgcccagcaaattcaaatttcaagagattaagaaagtacactccaaatcttgatttttataaaactcctctcttttaaacagttagtccacagctgggctctttccttgcctcagtagctgaagtgacataaacaaggatggcatgtcacattgtgctctattgagaaataatgtggaggcagaagggtgctgtggttaggaaccctccttatcctcatctgtagaacaggggttgaatagagcttctaggcaccgtactcttacttagaagttggcctggtacatattaaaagtaatggcacaaaccacaattattttgcaccaacctaataaaagtgtgtgttgaattgtagttataattattcttactatttttaaaaacaaactatccaggtcatcttcaccttgatctgcagcagggtcctaattgggagctgagaacacagagaggagaaatgtaaatagtccagcctaggaagaggttaggagagtgaggaaggtttccctgaaggccagataattcaacagtaagtctgagttagggcaagggatctagaaactgcattctagataaatgtatccaatatatgggatcagtaaacattatggtgggacaagtgcaggggtgactaaaaagacaagtgtgaggccagcaaagtagataagtaagcaggggtcatatcacagtggacaaggaccctgagggccatgttaagaagcttgggtttatctgctttcatttcctaaagtttatactcagtgccttccaatcattatgttcttgtttctaaattcccaaaacagcatgatacaaatagagtgcctctcttaaactggtcctttgaaattgatgataaaatgttatttcaatctcagtatattttaatggtcagagctatctttgtaaaagtgggctcaaagtaatatcccaaattaatagcatttagtagagtatgtaatgatgtatcaaattatttttctttgaataattaatcagaagcatcttgaaaattaaatagaaaaggcaatagaattcgtgtgtaacctaccgcataggtaaatcaggtagctttaaatttcagtgtggagaaattgtgtgcttatttatcaaaaagcaaaagacattcattctttgatatttttactatatttgttgtaaattcctaggttaaatttagagcaagaagaagttttctattttattaaaacaaacaaaagacatttctcaatttacttgataataatataggcctgtaaatatgtatctacacaatacattataattgcccccacaaaagaaaaaagtcatactatagcaattcctcttccttgcaaattttcccagtgatattttaatttaaaataacaggccgggcacagtggctcacacctgtaatcccagcactttgggaggccaaggcaagcaaatcacctgatatcaggagttcaagaccagcctgaccgacatggtaaaaccaaaccccatctctactaaaaatacaaaattagccaggcacggtggcacgcacctgtacttccagctactcgggaggctgaggcaggagaatcacttgaacctgggaggcagaggttgcagtgagccaagactgcgccattgcagtacagcatgggcaaaaagagcaaaactccgtctcaaaaacaaaaaacaaaaaagaaaaaagaacaaaagctggaattttcattctctatacataataatcaggtccaattccagattcaaaaataataagatcaacccctttttcacactgtgagtgctttatagaaggcataaagccatgggcttccagttgaatttcattccacaccaaataaaaagaaaagaaaaatgtaatacttatttaattggtttgagtcatataattcgtgatatttagtcctcagtctgtaatgtggaatacatttttagcatttgggtaaaaattataacctagtttgtcttgggaagtgaactacttacagctcaatggctccccttagtgacacttcgcaagaaattcacaaagcagcagcttttatgaagacctatagacagattttatccaaacatcaagaaaatagctgctattcataatttaagtggttctcaataagtgaattacagttgtgattctagggaaagcaactctttttttcataacctcattatgtttaaaggatattgaacgtgttctatggtttgcattttcacttggaatttaaatatatacaagttaggaagaataattcaggatcactctctttgtcattttttacatgtttattttttctagttcatatatgcacttgaacaggttttaaaaagataacctgcaattaatttaatttatatctgggtgcctattccaaatttatctattaagaaaacttgccttaaaattagtagctacagtaagtcaaaaacgtatttgatattcattaggaaaaatgaaagaaacaaaggagcaaccatgcaatttgaagtaagttttgagagtatatatttgaagaaattgggtcttctgttgctctgcagctttggcttttaaatgtggttgcacatcaaaataaactgggggggaggggtgtgaacttgttgttgactacaggttcttgggcccctcataagaaccactgaatcataatctccaagggtgggatctaggaatctgtatttttatatgttttggaacattgtctgcagaaggccataggaaatgtttatgtaaaagactgtatgtgtttatactaacagaaaataatttcagaatcttaaaaataacaattatcaattcaattatgtgatactactatgcaacaaaatcttaaatatggctttttggtctacatggagattttagctactctttcaaaaattaaggctcaaaaataccaaccactgactacattccctctacagcatcttattacttacagcaattttctgaaataggaaataaggtcaacatgtaagaatagcctattggccttttctaaactcatcacagaaacatccaaactctggcctgctatctgaattcaatacttgcccttctctagttttcagtacactggtcctcaggacaaactcccaacatggcaattgaagcccgtatatctttccagcttctatgggtaatattctatatatagactctgatcaaaccaaggaagttgactttcaatgccccagattcaccatgtccttgcatgccttagtgcatgttcactgcctggcatgcacttcttccctcatcagcctagcaaactctcagtcattcttttaggctcacctcaaacatcattacatcaggggaattattttcagtctctgaaatcattttcagtctctcttcatggagttcaatgctttcccactgtacccccaacaggaccttgtacacacctctattttagcattaacatgtgactataattattggcagtctccatatctaacttatatccccaggttttatcacacatttttggcacagagtaggggctttgttcatgtttgtgcaaggggttaataatattagttttcatttgtcccatgagtaacatatgccagtcaccatgctaaatgctctaccagcatctcatttaatccttatgaagtttagcaagaagtaaggattattcacattttaaatatatcagagagttaatcctgagaaatatcaacaacttgccagagttcacacaactagttggtggcagacctagaatttgaaaacagcatttttctggccctaaggacagtgtacttaaatgttacaccatagtgcttctctgcaagggctcagattgtacttgactgctaatagcaaattctctttgatgttttctacccaaacaccctcataggtagaacatcaaggggagatgaacgctgttttaatcactagaatgttccaaaacccagttcaggcaggtacgtgcgtgtacacatgcacacaaacatgaatattcagtgaatggcaaagcacacgtgtgtgtgtatatatatatgtgtgtgtatatatgtcagattgtcataactggaatgcttagtttgcaaaattgccaaaaaagcctgaaaaaaatattaaccacatcaatgaaaagtcaccagaataaaaaaggaagtcccctttaatgaaaaccttacaaaattatcccaaattacacgtgatttttaatggactacagccactcttgtgtatttctattttatttcttacacaagcagaaaatatatttatgcaaagggtagttagcatttccaaccactaacacatggcctgtaaaaaaataacaacctcattcttctgttgtgcaatagccctctgttgagcagcaataatgtacaatgtgttagtttcctgttactttactagagccttccctttcactcactgcccagactagttattccttggacataaagttataataccgagtttcaatctacttccaaaaatgtttaggcctgtcttaagaaataatcatatcagtttgctaataagcagaaatgcactgccagttgaggatgttgtcacaagtggctaaaaaacatataaatcaatctgtgaccaaggaagaaacaatacatttcttatgtgtccaaaacattatggttggggatcacagctgtaagatgttggaccgtcatcaagagaacaatgtcaaacactgaacttctggatgatttccataaaaataacattttgcttggggtcagtagtttttatggaactttggaatggtttttgctgacaattttttcgagttgaactcaaacacctccaaaatgctcctcaatatggaaatattatgtaatccaacctttgcagccatctccttgtgaaaactaagcacatagcatgaaaactagtatttttctctgtttgtacagttttataaaatttaaattatgctacatattcagaaagggaaacttactcttcagttttccctgtttggttattatattcaagtcagcacatcaaatgtgtactcattaaatccagcatggaaagaaggccctgatcccttctgtagaaatcttatcaacccagcaaaattcttttaagtgaaaagaataatggaatcgagtaatcagaatataagtagttcagtttaggcataatagttgcctctaatgttgtttgttcctctctgtatgtccaaaacaatttgcttcacccttgaatgaattctgatttttgtcaattgtccctttagattccagaatttgaaggtatgttgtgctgagcccaacaaggaaagctttcaaaaagtaactggaaggttttataaatacagtctcatgacaaagctagatgtggcataaaatcattaatccaaggagaccgtattggcgtagtatacctatgcaatattaataataccactccctaggattctgtaaccagagcccaagaaaaggaaagccaaaccactgaattcaatatttgcagcctacttcaggacatgaaaatattttggttctctcatgcagacaatttctccaaaatatttttgtcaaaagttacttattttagacagtctaatttcaaattttaaatgacccagtatgtgggatacacattcagaattttgtcatacctcaggaaacagttggttcctagtttttgtttactgtaatattgatttgaatctaggtaatttctcattgggatatatgtgttcatggatgttactaaaaccatgccttcagactacactgtagactacatatataaaaggtgtacatgataataaaacatctagttaattcactgtttagaaataaataaaaataatcatccaatttggtgccaggtttatctacttcgatcaaattattctcttcttctaaaactcccagcatttctccaatgccgacagaataaaattcagttcttcaagtggctccctgttggctacaataataccttttcacatccaaacctttaaagtcatgttgattccacttttaaaaatgtctcctctcataatgtgagtctgagttaaatctatgcttcaaacccagctccaggtcgggggcctgcatgaaatccagtatacatgtgataaatatctactcatttgctggatagagactcaacctgccctggtagcttgtaccagagggttattgatcagttatagtcatcaccaccctgcatgtagagaaattataatcaaaattaatttcaacatacaaatatttatgttaaaatacaattatcttgttattcatccttattatttctgcatttgttatgcaaatcagttcttttctcttagatagcaggcaaatatcttgacaaattataactatgtaactgctacttcgaaaaaaattgaatacaacatggtaccttaaaaatatgagccagataaaaatctctcctttttttttggagatagaatctccctctcttgctcaggctggagagtacagtggcgctatcagggctcactgcagccttgacttcccaggctcaagtgatcctcctacctcagccttctgcatagctgggacacaggcatgcatcaccatgcctcattgattttttttattttttatagcgataaggtctcactatgttgcccaagctgatcttgaactcttgggctcaagcagtcctcccacctcagtctcccacagagctgggattacaggcgtaagccaccaggcccagccaaaatatacattttaataaatgttttcaacagcaagaaatctatctaaaactttccatgaaacatgcataaataactatcatgtaaaataagttccaaacttagaagaacagaactatttggatttcaaacagtcatatgttagttgccttattatatcatatacgtgtttcacatttacattgtttggaatataccacagacttaataatagttgaatgattgaaatagtagatatttagtatctatcattatgatatataatctaagagaaatttaagtcattttttaaaatgtaattaaaaaatagaacataattgaatgtaatttttaaaagagtatcctttcatttcaggaaaaaaaggaagggagaggaaaagaaaaaaacctaataaaggagaaagtaaagaagcaatacctgacagcaaaagtctggaatccagcaaagaaatcccagagcaacgagaaaacaaacagcagcagaagaagcgaaaagtccaagataaacagaaatcggtatcagtcagcactgtacactagagggttccatgagattattgtagactcatgatgctgctatctcaaccagatgcccaggacaggtgctctagccattaggaccacaaatggacatgtcagttattgctctgtctaaacaacattcccagtagttgctatattcttcatacaagcatagttaacaacaaagagccaaaagatcaaagaagggatactttcagatggttgtcttgtgtgcttctctgcatttttaaaagacaagacattcttgtacatattatcaataggctataagatgtaacaacgaaatgatgacatctggagaagaaacatcttttccttataaaaatgtgttttcaagctgttgttttaagaagcaaaagatagttctgcaaattcaaagatacagtatcccttcaaaacaaataggagttcagggaagagaaacatccttcaaaggacagtgttgttttgaccgggagatctagagagtgctcagaattagggcctggcatttggaatcacaggatttatcatcacagaaacaactgttttaagattagttccatcactctcatcctgtatttttataagaaacacaagagtgcataccagaattgaatataccatatgggattggagaaagacaaatgtggaagaaatcatagagctggagactacttttgtgctttacaaaactgtgaaggattgtggtcacctggaacaggtctccaatctatgttagcactatgtggctcagcctctgttaccccttggattatatatcaacctgtaaacatgtgcctgtaacttacttccaaaaacaaaatcatacttattagaagaaaattctgattttatagaaaaaaaatagagcaaggagaatataacatgtttgcaaagtcatgtgttttctttctcaatgagggaaaaacaattttattacctgcttaatggtccacctggaactaaaagggatactattttctaacaaggtatatctagtaggggagaaagccaccacaataaatatatttgttaatagtttttcaagttttgttcactctgttttattgtttgttttattgagaaattcttactcttagagactcatgaattaagaaagagaattctgctaactcagagaacctggttcctatgtaattcagaatatattacatttctcagtaatatttgttttttgaatccacctttatctgagccaatggagatttacttatagcgtattaggagatatttattccattttcttattttaatcaacattctaattatagacacatgggcctccctagctgatttcactgctcccccttcattgcttagaaatgggcatcatttcttgtatgtcagatccccctgcatcttcaacatttagtcttttcttctccatattttctatctgtggatctctttaggggattgaagtcaccctagctgaaggcctcaccagtgtttcacagaggacacagcccaccccttgcaggaggaggtatctctgagtgtgcagcacagaatcgcatgacccaccttaaccttcctgttgtcatggaaggatgcacggctgctctgtccactgtgattcctagccctctcaagatcactgctttctgaagaatttgcaatgactctggcttctggctgcttatctctggacacccgttctccaccagttgtacagttcatgtaatctacttggcttaattgattttccacttctctcttcctcttctaagatataaacattttaaatgatttattcctgtttcttattctggtgtttctttccttgtccctatgagataagtgtctcaactcactaaatctattcccaatgtataaaataattctaattccattttcagctaaaacatatattaccaagaagaaacaaactttatcctacagaatgatgttaggtagaaatatgtccccaggtttgagacctttcggatgatttcatataccatctttcttctgagtgttacccagtcaagtataagtagccaaattatttttgcacatctttctgtttctcatgtcttcatttattcaacaagcacttactgggaaggtctacaactgcataggcaatgctggaaaaagggttaagtaaaccaggacatgacaatggtggcaaatgactatcaggtcttcccatgtgtttgactcaaacttattaccctatggtccttctgacaatggcagaaggtctgaatccttgatgctaaacttatataaaagtagaattattacaaaggaaaaagaaataaaaactaacattcattttcatatgttggatgaaatataaatgaagaaaaagataacatcaattttaactgtaattctccatccaccagtaacagatccttaagacaatagaatcatacagtattcaaaccagcagccttctcaaatttgagcaaaaactctatcaacctctggtaaagttcctacactagtcacagaaggtgttaactttctactctgattctgtctccataatggggtaaactgttgatagtttaccccatcaacagatggtcggtaaattattgattcgaagaatcgagagagtgcagcaacataaatctgttaatgtctgatcaagctcctgccctgttctccgaattcagcttcataattaagggaaggcctgttttctatcctcagatttaggttctagtagcagttgtgtaaccactagtgagtcacttaactcctctgggtccccatttctcatgtgcaacaagaaagaggggaactggagatgatcactctagttccagacaagggaacatttcacactttgtttacttcagggtgatgtccctgagtcctcattagtgactgcgtcctttggaagttatcccaaccctgcttttctcaaaagtgaaaatgtataggctctcagaggagacagatttaactctgcttctctaatgttattgaattaaaagctgttcacattagtggttattaaatattgaaataacactgggaagaaaaagcatatataaatacagctaaaaacaagaatagatattcattctcacaaagggagacagcaaagaaaatggaaagtgcactggtgctagcgttagacagcttgtgttaatgtctcaattctgctactaactggttgcagcttgtgtgaccttgggcacattgtatgatctcgcagaatatcatcccaaatctgcaaaatggaattggcatcatctcttttgcaagattgttatgagaattaaaaggttcttcattcaatataataataaatattttgtatataaatgaatatcaattaaaagttatgactaattccacaagtcaaacatataaattttatttcttgattcatgatatgtgatagtattcataaaaatgtacatgcatgataatttcaaggaataagtatatatgtgagaatcatggaaatgaaattaataatattaactagtaattaaattgtaattttgtcttgagtcttcttaaaattaggaaactacttaaagtacattttttataaatgggcataaatacagacagtatatattttccatggatatattttcatagcagaggaaccaactagattctttctcaatacaactgcaactatttctggtcaaattatggggaaaaggcctgttttgtggttgatctgttacaaacagggtgtaacttcttgtaacgcaaagataatttgtctggaattcatccaccactgaaaaaataaaattaaacaaggatcatgatcaaatcaattgaaatttttccaaatttaagcaataacatttcatcttactaacatagtagattattgtaactttatttcaaatgttcttagaaaaagaaaagcaaaacaaaacaaatggctgtacctcctttatgctagccacttaaccctttgactatactatattatgtaattatcccaaaagccctgtgagtcattgatgtccttgttttacgaaagaggaaactgaggcacagagaagtgtctaaagtcatacaactagcaacatgtgagtttggaagtgacacccagctctggctgactccaaagcccactttccttctccttcatcataacttctaaagtcatatttattattagttccaagattgcccatgacatataatagtgaggtatttcttcatgatctaaaactattatcccccattaagaagcctgagacgtcaagttctagaggcctcaacccaggataagacttaactctgaatctgaactcgaaatgtgactgtgtgtgtgtgtgtggcgcggcggggtagggtgaggcggtgagacacagagctgcaggaagcctatgggctggctggatgtggggtttgtggggaacagtggattgggggaggcaagtgcattggtaggcaagaggaataaaaaggagaaatgggaaatacgtgctatcagtaaaggaccaaagttcagaaagagaacagtaagtctggctccttgggaagccctcgattgttatagcnnnnnnnnnnnnnnnnnnnncagggtatttgccagcatgatcatctttccccctgagtccttgttcagaattgcaatgatccaggaagaaacatcaacagattttcttcactgttggaactaccaaaacaactttcttcagaggatacttcattttcttccagctactttcagacattcaatatcaggattttaattgtcacacaccttttcttgcccatactggctctcaagtaattttgaggctaacatatccatcacatacacaggtacaaaaaatgaaggaagaaagaaagaaagggaggaagaaacataggagagacggagggaggggggaagcaagaaagcaaaatagcaatcatttttattcatagtccttaaaatacagtggtaacacaactccaacaagtggaaatatttcattaattggaaaattggctacataataatttcaaaagacataattacatgaccacaaaataatctgacatataaacagtttgcaaactgttacagttacttctatatctatagctgtgtgcagtgaaaattgttgttcaatatgatgtggaggcaatccaacatactgaatcacctacaaaggattaagttttattttaaaaaagaaaactggcagatacatataagaaaagtttttaaacaaggttaaataataactttaccaaagtgttctgcctaacaggtttaatggaagtattcacttttgtactattagcatcagttactattttagctgctccgaatttctatcacaaatgaatttcaagcaagatctagattttcttcaacaaatttaacaacttcttaaacattttaaagaggagtctacctttataaataaaacaatcaaatgtattttaagtgcttggaaattataaagcacaataaatatataagctattactgttgctagccagtccctagctacagcaacagtttgacattcctttccccattgctcacactgccgcccacactggagatttcagtctaagaattacctatattcttccccaaaaggagtcaatagaagtacgtgatgagaccacatatttgagaatgcaacaatgtagcccttccttactagaagggagtaaggatatacttcacttccttctagtatatctgcattgttttttttctgtagctgctggcaatggagctatatcaaacatggaactagaggtgcaactttactttgtacattgtgtgatacccaaatacaataaaataaactaccactaaatgtggaatcttgaactggagacatttctgagtcagttaacgctaccacatacggtctccccagaacacgcacattccaggttggtcccaatctcccaagaggtagaaaatttggtgacaactccgtcaactatctggctatgatgatctcaagatttgaaaaaaagtaaaaagaattctgatcccaaaaagaaaggaacccttattttcatccttataactactcagtgacatgtactgcccctccaccagaatgacatgccaaaaacgagtgccatgccctggggcactgtgctgtccctggcagcagtccgtccatccttttgacttccttccctacttctgttctacactttgcttatttatggtttttgattgactagtttgggaaggaaaaaaaaccctacctaatgatttaaaaattaacctaggaataaactggagaagacataatttaataaattcctcgaagtatagagctatggaaagaatattatttatacttctttttttttttttttgagaaggagtctcggtccgtcgcccaggctggagtgcagtggagcaatcacggctcactgcaagctccgcctcccggggtcatcccattctcctgcctcagcctcccgagtagctgggactacaggcgcctgccaccacgcccggctaattttttgtatttttagtagagacagggtttcaccatgttagtcagcatggtctcgacctcctaacctcgtgatccgcccgcctcggcctcccaaagtgctgggattacaggcgtgagccactgcgcccggccccatttatacttcttaaaagaagtttaataaaaataaactagaaaacaaaaatagaaacactttgtgtttcacatacaagggattttcctcatgtggcaactatttggaagaaggtcctatttatcactaagttcacccttactgatctttttcccatagtaaaaaaaaaatgattatgactcactttatgaacacaccaaatgctacaggaaaatagattttagttttatccaaaccagcagtgagaataatttatgattccaaaaaagacatagacatgcagagtcaatttaggaaagtgagtcagtttcatgcaaataagttctagctttcttgattgccagtctccttttaatgttggaattttagggggggaaatgaattattgtggtaaaccaacaattccacttgttaactatggaatatttaaaggatagcttaatatgtacatgtgaaagggtcaagagaatagagttttatttgaatatccagatgatccaattaaatccaaaatggtattatttctagaacagaagagaccattagaatgtgctgttctagtatctctagaattctcaaatttattatgagaattatcctttccacaattgtcaaaatagattgtttggccataaacatccttgcaagcctaagcaatttgaaattcagggcctatatcagtttccttgcctccacccctttcacccccaaaagaaaccagtcaattagataatggataaattaacactatattgacaagcaaagaataattagaaattaataagcataaagagaaatgactgtgtaaaaaaatcacttgtttcaggtttaatgtagtcactttgggacaggaatataaaacatgaaacatgaaaatagtcagcagatgccctttccatccattaataaagtatcttttaaataaataatcaatcaacctatagattctgccattaggaaattagcaacagtgctttgctgtaccagtagagctatcagattagacaatcttcatatgtataggtgacataacattctcctaaaattttctatcaggtttctagatggaggttaaaagccttgtatgattttgtaataattgatataccaagcctggcatccacaataaatattgatgttttccattctgtaaaaatgatataaaacatattagtgcttttatagttatgcaactttgtatgttttgataccaaaaaagatccagaaaatgtgaaaatacagatagttatctaagtatagcttcaccgagattgggtgatttaattatcaatttgaaggaaaactcttttatctgtaacaatgatcataactgaactactgaactggccagcaaaattaatgtcttgatctgccactcaagcagtatttagtcattattttcaaatgactaaaattaaataaaataaactatacctttgagaatcattttaactgaagtagccagttataagggctagccacaggcagtgtttacaaaatgtctctttaagaggtgtaagattatttcagatccacaaagaaaaagcagcagatggtcctgcttttcccttgtatcacttgaaacatacaagacttaaatattaagttaaaagtgtattgagaatacttcagaaaacaaatctatgcccaaatcactccttaaagcatggaaagaaaaataatgctaaagtggaggaaaataattaaaagtggaattccctatatattctaatttgcaagatgaagcttcactcttcctgcaaaatactacattatgggtatgaagacgccacaccagtcctaaccaaaacatgtctcagcccttctccagccttcaccaaatatcacattgccagcttctcttttgtcatgtccttgcacttccacaaattggatttcccatcagagtgttagtacactctgatgaactcaacaaagcagaagtaagaaaaaacaactttaaaaatgttgtttttatattacaaagcaatgtttcaaataaatgttattcaatattactgaaatggcattgaaatagtcataatgagaaaagtgagaacttggttgaactttcttatactggttttacaatttaattctgtgttagtttgcaatacattaaaaaaaggaacgacagaatctttcaaaatccttggtccagtcctactgcacaaacacaagcacctactgcctcccttctctcccgttagtcaatcctaagccttgcctgagaaatatcagtgattctgtcaaatactacagactgctctctatcctgagtgccttgagaaggtctccagctattccagtgtcacctttgacaggaggcaaaggtggtaagcaaaggtgtcaaggccctgtcatccattctgccttgtgtttctttcatttcctgtacagggtaactgctcagaaaaactcaactatttctcacaggacaaatcatataaaaccttacaggattaaaaaaagagagagagaagcgcttgtaatgaaaagaaacgaaagaaataataagagaacacacaagaggaaaccagtcacacccattctctctagtgctatgtagcttaacccacacccaaagtaaactgccttcacttcaagaagctgtctctctgtaaataaactgaccaatgtatctttaagacataaacatcttggactgccataataaacattgcaaaataaatacaaaataacatctggaggcaaagctttgctaggagtggggtgagagggagtgctagcttttcttagcaccattaataaagtattaatttcattttcttttagtttggaaaatgctttccattattaaccaaaaacaaatcaaagacttactgattttactttaaaatccaaagaatggaatactgtctgtccataatggctttttgcaagttgggcttatcttcttagttatattttaattcccttgttttctactgtttgaaactagcactcagtcaccaagcagttaatttagatatgaaaatggtttatatttaggtctaattattactgtcctgttacataaaaatcttctttctgtcttgggaaaccaatttctccaatataatgtaccagaaaaacacaatacttccattgtaagagtatattataatgattatgacattcaaccattgtttctcattgcaatggcagagaccatgtttcatgcacttcctatcagcatccgacttatgtgtagttatcccattcaattaacatttatcatcggcaaacagcaactggtccagctctctacctgtacaaaataattacatcaaatgcttgagttgctcctagtaaattttactataatattattatgtagataattgccctaggaattacttctcttattttgtgtaatgctctggtaagattttttgtaggtgacatagaaagcattgtattccaatgccaagaaaaaaaaaaaactcattagaaatatatgtaacttacagccaggcgccatggctcacgcctgtaatcccagcactttgggaggccgnnnnnnnnnnnnnnnnnnnnnnnnnnnnnnnnnnnnnnnnnnnnnnnnnnnnnnnnnnnnnnnnnnnnnnnnnnnnnnnnnnnnnnnnnnnnnnnnnnnnnnnnnnnnnnnnnnnnnnnnnnnnnnnnnnnnnnnnnnnnnnnnnnnnnnnnnnnnnnnnnnnnnnnnnnnnnnnnnnnnnnnnnnnnnnnnnnnnnnnnnnnnnnnnnnnnnnnnnnnnnnnnnnnnnnnnnnnnnnnnnnnnnnnnnnnnnnnnnnnnnnnnnnnnnnnnnnnnnnnnnnnnnnnnnnnnnnnnnnnnnnnnnnnnnnnnnnnnnnnnnnnnnnnnnnnnnnnnnnnnnnnnnnnnnnnnnnnnnnnnnnnnnnnnnnnnnnnnnnnnnnnnnnnnnnnnnnnnnnnnnnnnnnnnnnnnnnnnnnnnnnnnnnnnnnnnnnnnnnnnnnnnnnnnnnnnnnnnnnnnnnnnnnnnnnnnnnnnnnnnnnnnnnnnnnnnnnnnnnnnnnnnnnnnnnnnnnnnnnnnnnnnnnnnnnnnnnnnnnnnnnnnnnnnnnnnnnnataaacttgttaactatcaggggaccagtaaatgccttccatttagtcaaataaatatgtaaggatatttaatctcatataagtgttttttaaaagtatacttgtctctctttccataggaagtaatgtctggcagaggaaaactgctgagctatgtctgagatagtttcatctgctcacaggctgctcctgatggcacatatttattgtgtttctcacatggcctaaactataccagcaaaatgaggaattcagttttccttttaaaaaattttccttttgaaaataacaggcattttactaaacattcctttttttcttattttgattagccaaaatgccagttgcaggcaggctacataaaggatattctaaattccagaccctctttcatcagatattgcaaaggttgaaagtaagatcaaatttacccaagccacaagttgtaataaatttaaaagaatcatctttggcttccattattagtcatttcctctctttcaacaaacaataattcaacaaataaaaattttaaaagttctgtctattttaggctttgcagatagaaagacttgcatttaaatctctttattattgaccgtgcactcttggaaaaataatttatttgattctccatatattcatatataaaataaatataatatttttacagactgtatagagttgtgaagattaaaggaaactatgtggcatgccaagtatgtactgggttcccagtaaattgctactaattaaaatgtatgtgctttgcttaaaatagaatttccaagtcactctgaaacagaaatatcgatatttctgttatatataaatatatataaatacaatcatgtaaacacacatacatacacatatatttccttcaataatcaatctttctataatatttaatttaatcaataggtatttacagtatatctactgttcaccaggcaacatgcttgatacagataatacaaatccacaaaataaaattcttgtctttgaatcttcctactaggagaaacacataagatacccaaatgctatgagggtattttacctaagtctgtgcctcctggtgcggaggtcaagaggaatgagccccta

SEQ ID NO: 1660 - DNA, 1614 bp, Homo sapiens
ccctcccccctccctgccctcctcctcctcctcccctatgtggtgctcccgggagcccagcccaacactggagcgtctcctgctcgcgcacgccagaagcagctcggggtctctccgccgccccgccgctcgcccgcccggatcccgcctgcggcagttgccgcacaacatgctacctgcggccgccccggcggctcctggaaccccggttcgcggcgatgccagccaccccagcgaagccgccgcagttcagtgcttggataatttgaaagtacaatagttggtttccctgtccacccgccccacttcgcttgccatcacagcacgcctatcggatgtgagaggagaagtcccgctgctcgggcactgtctatatacgcctaacacctacatatattttaaaaacattaaatataattaacaatcaaaagaaagaggagaaaggaagggaagcattactgggttactatgcacttgcgactgatttcttggctttttatcattttgaactttatggaatacatcggcagccaaaacgcctcccggggaaggcgccagcgaagaatgcatcctaacgttagtcaaggctgccaaggaggctgtgcaacatgctcagattacaatggatgtttgtcatgtaagcccagactattttttgctctggaaagaattggcatgaagcagattggagtatgtctctcttcatgtccaagtggatattatggaactcgatatccagatataaataagtgtacaaaatgcaaagctgactgtgatacctgtttcaacaaaaatttctgcacaaaatgtaaaagtggattttacttacaccttggaaagtgccttgacaattgcccagaagggttggaagccaacaaccatactatggagtgtgtcagtattgtgcactgtgaggtcagtgaatggaatccttggagtccatgcacgaagaagggaaaaacatgtggcttcaaaagagggactgaaacacgggtccgagaaataatacagcatccttcagcaaagggtaacctatgtcccccaacaaatgagacaagaaagtgtacagtgcaaaggaagaagtgtcagaagggagaacgaggtacaatcatagaaaaaaaggaagggagaggaaaagaaaaaaacctaataaaggagaaagtaaagaagcaatacctgacagcaaaagtctggaatccagcaaagaaatcccagagcaacgagaaaacaaacagcagcagaagaagcgaaaagtccaagataaacagaaatcggggattgaagtcaccctagctgaaggcctcaccagtgtttcacagaggacacagcccaccccttgcaggaggaggtatctctgagtgtgcagcacagaatcgcatgacccaccttaaccttcctgttgtcatggaaggatgcacggctgctctgtccactgtgattcctagccctctcaagatcactgctttctgaagaatttgcaatgactctggcttctggctgcttatctctggacacccgttctccaccagttgtacagttcatgtaatctacttggcttaattgattttccacttctctcttcctcttctaagatataaacattttaaatgattt

SEQ ID NO: 1661 - protein, 274 aa, Homo sapiens [sequence omitted]

SEQ ID NO: 1662 - DNA, 23126 bp, Mus musculus
  misc_feature (1)...(23126): n = a, g ,c or t
gctttgtgcttggactcactcactcttgctttctgcacattgtctctttgtaaactctctcttggcctgctcagttatcctaatttgtttaagaaaaacataatttcatcaccaaatggaattaatttaggtgaagttctagtctgattaacaagcaattgagcctagcggatcctgggcagccttggagatgggttcttttgttcaagggatggcacacagaaccaggaaatcctgcccttgtatagacacttctaggtccttcacgaccatgagaaaagttacagactccttttctgcggaaaaaatcacacatacgtctaatttaaattgcaagctcactgtggatgctggaagacagacagacagacagacagacagacagacacacagtgggggaagggtggagaagagacatgtgttcacgagtgattcagagcttggtgtttgtacagagagggcctagttaaggggtgtggatgcttagagggatagcagggatgttgaagaagagtgttgtcttctcagaaccatggttaggataggaaagaacctcctaggggatgtatggcctctaataggggccagaggcaatgagagctggtgcctgcctttctcctttttatctgcattgtctcctatggagcaaagccagctggtgccagacgactgactgggatgccattgcatgccattgctaccgtcatgagtattcagggaacagaggaacctggtgtctcagcttaggaattaaatacacacacttcaaagcaatctagaagttctgtgtttattttaatggtacctacaccgacaaatcacagtattgagggatacctgtctgttgttggaagtgaggatggccttctgttcatggataactcccctaaacactacttggatttttaaaaaaaaatgttagttgatacacacgtttagagtggttttaggccaattaaacagtgaccagaggggcttgggcaatggtttcatctgtgaagtacttatttcaaaagccagaggacttggttttgaatccttagaacctatatatggaactgggtgtgccagttcacgttggagactcttgttatgcagatagaggagggtacatgggtgatccctgtacaggcataccctatgtagcccaggctgccctcaaactagaaacatccctcatacattaatctccccagtactgaggtcataagcaggagtcacagtgcccacctctccttacatgtgcgtgcgtgtgcatgagtatgtatacatgcatatgtgtgtgtttatacatacatatatgtgagcatgcatgtacatgttcatgagggtacagacagatccctgaggctctacggccactcagcccaatggaataggtgagctccaaggtcaagtaagtaactctgcctccaaaaataaagtggagagtgattgagaaagacacctgtcctctgaatgtacacctacagacacatgtgcatatgtacatggacacacacaactacacagacacatgtacatgtacacagtacactgtgtccagtgagctccagtgatcctcctgtcttcaccccgagccccagtgttggactctgacacacctcgttttatgtggcttctgggaagccaaactcaggttctcatgctggcaacagcaaatgctttatccactgagccacctccccgtagcctgggttttgacaatggtctactgcctgctacctctggacagtatcacacagaatggattcacagttgcaagtatcctttgggctaaatctatttactccttcctcccctccaacctgtggcattcatagatcttatttattgtcccacactttgtttattctagaatgtctgaggctagagttataccggaagcagcctgttgagagcggcttctttcacttatcatcatgcactgaaggctccctgtgtctctttgtggcttgatagctcacgtctttttatttctgagtaatactcaactgtctagctgtacccgtgtttgtttattcttttgcatactaaagggtgtctcagccgcttctctgttttcaccgtgacaaaattaataattaataagcagatattaatcatctgtgtgcaagtttttgtttccagcccatcgtagaacgatgacctcttgcttctgagagtcccaggagaggacatgcagcatacaagggtcacattaggatcacaccctcatgtatcccagtccctcttagaatgagttttccaacagctccaaaagaggaaattatgcaggaatggaaagatctcaaagcctggagaccacactgggtggccaagctggtgactgtggtacaagatgaactgaaattaggtaacgctgtcatggaagccactacttctgcatccagttccttccaacacacttagcaactccatgggtccctccactgccccctcatgcatctcaccttggatgtgaattttgcaaactcatctgggctttatatttcatctctgccctggtcccctgaggggctggcttttctcactatcggaagctttgaaaatcaccattgctactttggtcctacgtgtcttctcatctctcctccataaaatctttgtgtatccagaaagccaaacgactttactggagaatgtgacccttcatgggcacacaactggcaggacagggatagaagccctgttttctgtgtgatagcctttgaaaggatcctttgacattgggtctaggtgactggacaatctaaactctgctcctccttcccataccgtcccctcaatcctcccatccatccaagtagggacggtacaactagcccttccttgattaaaatcagctgtgtcccatacagttcgccctggacaagagtgttggtctcccagttgaagggtatcatttgtttggtctcagcaggcatcagctatgattacagattagattcagacagccaagctggaagagcgcactgtttccaagggctgagcctcctacccatgacagtcagttccggctgagatttttgttctccccaataatgggcttgtttgctggagccacctgtcactgggcttcagctccccagctacctgctgggacacttccctcatgtagcttcttccccctctgcagggacacagctctgtaggaggatatcagggctgctggcttctcccaggcaaaggtctctgtgggctgtcttcccctcacttcaggacacttgctttttgcagactgcctggcatggggtcccacttacctctccctcaactccccatgaggcaggctgaggtgggaagtactcctcccttccttctggctcccctcccttccacttcctccccacccgcccactgggactatcagagaagtgctaggagctcagattctgctcattacacttccttccttaggattagggctcagaactcagatgtcttgactctgattctgccacagggacttcaacagaaaccttgcccgtcaaccctcagacaccatttcagagccaaccggggtgggggtannnnnnnnnnnnnnnnnnnnnnnnnnnnnnnnnnnnnnnnnnnnnnnnnnnnnnnnnnnnnnnnnnnnnnnnnnnnnnnnnnnnnnnnnnnnnnnnnnnnnnnnnnnnnnnnnnnnnnnnnnnnnnnnnnngggggggagcagcccttgcctcctcctcctcctaggcccaggaataccagacagagcctgaggtagtactcaggttccaggagacaatgtctcctgtagcagtctgaggcagtcagccccagatttgttggcactctgttcaatggccaaacctaaggggtgacacagccactgggcaacagtatactccactacagacagccttcctaattacctctccctgggagccacagtagagtcacatcccctgaatggaacttgaggggtgggtgaatggatgctgggggatgaagggagaggcaggggagggaagagccactggataatagttcaaaacattatactattttttaatgctattattgaaaacacagattaatcaagctcttctccatggtagatgcaggcataaattttttttcacataaattatttcacttaccagtcctggtggtacacatctgtaaacccagtatccagagcgctgggactggaggatggcaaattccaggccaacctggactccacagcaagaccttaactcaacaagaacaaagaaaaggaagaaaagagattgagttgggtgtggtggtacatgcctgtaatcccaaccatcaggagactttctaaacgtgttttgaggcggggtcttcctaggtagcttagacaaacctcaaccttgagatcctctcatctctgccgctctaatgcccatgcttatttaattacatgtatttatttgtgtacgtgtggacgtgcgtgtgacctgtgcgtatatggacatcaggggacattcgtgggagtcagttctcttcatccacatgtcagcctcagggatgaaattcaggttgtctgccttggcagccagggcccttacccactgagccaccttttaggtccccctcattttaaagttgagaatttgaactatcacattgagttctaaagagttctgtgtatgtacatgtctgtacatgtttgtgcccacatgtgtgcatgtgtaggaagaccagaggtcaacactgagtgtcttcctcaagttctttctgctcattaacttttattactttgaagtttttcatttattattactatgtgagtgcatgtatgtgagtgtgtgtctgtgagtgcttgtttgtgagtgtatatatgtgagtgcatgtatgtgagtgcatgtatgtgaatgaatgtatgtgagtgtttgtatggtggtgagtggtgtgcacatgccacagtgttgctgtagaggccagaagacaactgtatggagtcaattttttccttccacctttatgtgggtcctggggttcgtttctaaggcatggggcttgtgtagcaagcatctttactttctgagttgtgttgctgcccccctcagctttattgcgacagagctggagctcactggttcagctagagtgactggccatcaagctcagaggatctgtctgtctctgcctccccagcactgagactgcaggcatgcaccactgcacctggctttcacaacaggctctggggatccaaacccaggtctctgtgcctgtatggcacacacctaagcctcagtcttatgccctttctaccaccagatcttatacttcctcccattgtgtgtctcttcgctttcttgttagtgttcttaatacacacatgtcttactgagtcaaagttttctacttttccttttgctggctgtgcctttggcgtgtattttggagccactgccacatctgaagtccagatttaactctatgtcttctaagagtcttagagcttttgatctttcatttttgtctctgatctattttgaattattcctttgcatattacatgaagcagaggctttaatcttttgtgcatgtatatatgtaaggcctcaagttgtaaaacttaatagctaaaggggcttggtgagaaagtctggtgtcatgagttcaatcctggggactcacataaaagcagaaagacaattgattctgcaaagttgtcctctcagctttatgcacccacacacatcatgaacacatagtaataatagttttttaaaaacaatatatgtaactgtaatatcttttctttcaacataatctattttgtagcctatttttattttattttatttttttattgtctattttctttatttacatttcaaatgttatcccctttcctggtttccctccctcccagaaacaccctatcccatcctccctccccctgcttctatgagggtgttcctccacccacccacccactcctgcctccctgctctcgattcccctacactggggcatttatcaagccttcataggaccaagaacctctcctcccattaatgcatgacaaggccatcctctgctatatatgcagctggagccatgtgtactcctttgttgatggcttagtccctaggagttctggagcgtctggttagttgatattcttgtttttcctatggggttacaaactccttcagtcctttctctaactcctctattggggaccctgtgctcactccaatagtgggctgtgaacatttgcctctgtatttgtcaggatctggcaggggctctcagaaaacagccatgtcaggctcctttcagcatgcacttcttggcatctacaatagtgtctggttttagtaattgtatgtgggatgaatccccaagtggaacagtctctgctcaacactttacctccatatttgctcctgtgagtattttgttctccttctaagaaggaccaaagcacccacactttggtcttccttcttattgaacttcatgtggtctgtgaattgtatttggagcatttaggctaatatccacttatcagtgagttcacaccatgtgtgttcttttgcaattgggttacttcactcaggttgatattttctagttctatccatttgcctaagaacttcatgaattcatcgttttcaatagctgagtagtactccattgtgtaatgtgtaccacattttctgtatccattcctctgttgagggacatctgggttctttccagcttctggctattataaagtaaggctgctatgaacatagtgaaacatgagtccttattatatgttggagcatcttctgggtatatgcctaggagtggtatagctggttcctcaggtagtactgtctccaattttctgaggaactgccagactgatttccagagtggttgtacacttgcaatcccaccaacaatggaggagtgttcctctttctccacattctcactagaatctgctgtcacctgagtttttgattttagccattctgactgctgtgaggtggaatctcagggttgttttgatttgcatttccttgatgactatgaatattgaacatttctttaggtgcttctcagtcattcaatattcctcagttgaaaattctttgtttagctctgtaccccatttttaagggttatttggttctctggagtctaacttattgagttctttgaatgaattagatattagccctctatcggatgtaggattggcaaagatctttccccaatctgttggttgcctttttgtcctattgacagtgtcctttgccttacagaagctttgcaattttatgaggttccatttatcaattcctgatcttacagcataagccattagtgtcatgttcaggaattgttttcctctgtgtccatgtgttcgaggctcttccccactttctcctctataagtttcagtgtctctggttttacgtggtggtccttgataaacttggactcgagctttgtacaaggagataagaatggttctatttgcattcttctacatggtgaccaccagctgaaccagcaccatttgttaaaattgctatctttttttcccattggatagttttagctcctttgtcaaagatcaagtaaccatacatgtgtgggttcatttctggaacttccattttattccattgatattcctgcctgtctttgtaccaatatcatgcagtttttatcactattgctctgtaatacagcttgaggtcagggatagtgattcctccagaagttcttttattgttgagaatagtttttgctactctgggttttttgttactctaaatgaattggcaaattgctctttctacctctacgaagaattgatttggatggggattacattgactctgtagattgcttgtgcaggcttttactatattaatcctgccaattcctgagcatgggagatctttccatcttctgagatcttcttcaatttctttcttcagagacttgacgttcttgtcatacagatctttctttcacttgcttggttagagtcacagcaaggtatgtaatattatttgtgactattgtgaagggtgtcatttccctaatttctttctcagtctgtttatccttttgagtagaggaaggctattgatttgtttgagttaattttatttctggccactttgctgaagttgtttatcagctttaggagttctcttaaatctttggggtcacttaagtatacaatcatatcatctgcaaatagtgatattttgacttcttcctttccaatttgtatccctttgatctccttttgttgtctaattgcccttgctagaacttcaaatactatgttgaatggatagggagagagtgggcagccttgtctagtccctgattttagtgggattgcttcaagtttctctccatttagtttgatgttggctaatggtttgtagtatattgcttttactatgtttaggtaatggccttgaattcctgatatttccaagacttttaacatgaaggttgctgaattttgtcaaatgttttttctagcatgtaatgaaacaatcatatgtttttttcgttgagtttgtttatgtagtggattacattgatggatttccatatattgaaccattcctgcatccatgagatgaagcctacttgatcatggtaaatgatcattttgatgtattcttggatttggttggcaagaattttattgcgtattttttcatagcctatttataaaatttccttttctttttcaatttcttaaaatatggcattgctatgtagcccaggctggcctggaactcataatcttcctgcttcagcccccaactgctgggattccaggcatgcactattacatctaccacaatttgcctttaagtgaggctatgatttgcatctggctcacagacttgctgggaaatccaacagcagttctcttgagcagcacttgctcccagtggccttgttacccagtgtggtgatgctgggaaggagcacagataacctgctgaagaccgcagttttcaggttccttgagggaaacttgagtttccagtgagtggtacaatgtgcacacaagcttaggtgggggggggggtgtcaccagcctactggaagtcatctgactttcccttcatgatttgagaatgaatgtagcctggtagtggtctatctgctcctcctggaataccagcaactgacttaatctcaattgtatcaggtagggatttgagtacagacctaggcttcatcctgaagttggatgagaactccttggaatgccatgacaccaaataaaggattcccatttatatttgaacttgacaacatcgtaatgttttagcatagacacaactctttgggtgcagggacaagcttatattatgagaattttccatgtaatatttgggccaagcttccatgcattcagaggatgatgcacaatttttatgaaattcaaatttgtctcacagccttgcattttagtttcataatctaggaagctccaccctaaccctagcccaccaaggtcggttcttactgtagtcctcctgatcaaagactcggaacgtctgagtgagaagggccttactctggacatctcatagatcttgcatcctgggcaagaaagggatttgaacttgctggagtagtcagtgtggatgttaaccacctcaatggggtgctcacctgtgtgtgtgtgtgtgtgtgtgtgtgtgtgtgtgtgtggccctgttgaatgctactcaagtgttctattactgagctacatccctagctctttttgtatgttttattttgagacagggtctcactctgtcatctaactagaacctgtaatcctcctgcctcagtcccttgaatagctaggcttacagtttggcaacaccataccttccttaactgagtggtgggggattgttgtttgggttcacagagggtactataataccttctattggggagaagagagaccccatagtaagtgtggttctcactcacaggttgacataatcctggaccacgcagatgatgaggaatggaggcgtcagaaccgacccaccctaccccatcggccacggaccagccagcctctgtacccggcattccagggggcctaggggggcaggcctcacctcgcctgaccctgggtcctgttatcctgccaccagagcagggcctggccccaactgtgttcttgaaggcattgcctgtccccttataccacacggtacctcctgggggcctccagccacgtgcacccctggtgacaggcagcctggagggggccagcgtacctttcattctcagccccttgctgcagcctgaaggacccagtgccacccaggtgggcaagccagccacccccgccctgactgtgaacattgtaggcacattgcctgtactctcctcgggtgtggggtctgcactggtcagcacaggcagagtgaagaatactggtaagtacctgtgcccccactgtggccgggactgcttgaagcccagtgtgctggagaaacacatccggtcccacacaggtgaaaggcccttcccgtgccctacctgtggcatcgcctttaagacccagagcaacctgtataaacacaggcggacacaaacacatctcaacaactcccgcttgtccttggagtctgaggggagtgggagcagccttctggaggagggagacaggcccggagagaccgcctcagtggatagtcgtggagatgaaggtgctccagagagagccctttccccaggtgccctccccgcccttgctgctcagaacagggaaaggaaggtggaatcggctccctctctcggggccaccctttcccacagggaggcctctgcggatcacactcagatggtgtcacctgagttttcactagccagcccgcagcctaggcggaagctgccagaaccaaagccatgcttcctgcagcgacagcaggagacctgttcagagaagccctgggaccccaaggccttggagggccagctgaggaagtgtgagagcacagactctggctacctgtcgcgctcagacagcgtggagcagccccctgttgcctctagcccattgcatagtctatcggagcacagtgcggagtctgagggggaaggaggccctggctgttcctcttccggcaacagggctgaacgaggaaccccagggcccagcctggagttagagaagaagaaactggaggaacgaattgcccagctcatctcccacaaccaggcggtggtagatgacccacagttggaccatgtgcggccccgcaagactgtgctgtccaagcagggcagcatcgacctgcccatgccatatacctacaaggattccttccactttgacatccgggctctggagcccagccgcaggagggctgccctcagcccggcccgctccaccttcacacccctggaaaaggccagacctctctttttccactcagtccccacgcagctctccactacagtggagtgtgtccctgtcaccagaagcaactcgctgcctttcgtcgagggttctaagttgtggccagagcaacgggacccacaggatgctgtcccaggaatgcagaaggccctgagccccaggcccaccccagcccggctgggatgccgcccaggactgaccttggcaagcatctccagtggtcacccacgggccctggtaagacaggctgctgtggaggacctgccgtgtaccccgactggagacccttcagccgctgctgaggaactagatggaaagagagctgtggcaaaggagggtgtggtgtacaagggcagagccagtaaaaagtgtagccagaggaagcaaaggatgttctcccaggagaaatggcaagtgtatggaaatgagactttcaagagaatataccagaaaatgaagaccaaccaccagggaggacagaaacacaggcaggtgaaacagggccaggggacagaactggactttcctcctcctcctcctcctcagaaacaggggggaggaggtgaggatacaggcctgtctcaagacagtaggatccctatccttggagacactacagcaggatgtaagctagagtcttggggaagtagaccatccctggaagactcactggaggctgagtctcctaagcaactgaaggtggtgaccagagtcaaatcatctcctaccctcggcagcacagatagcctctgtttgagtggcaagagctctttgctctctccaagtgggaaattagatctgggatgccagccgcctccggtgcctacggcttgccaagcaggagatttagaagctcccgagactgcttcaccagactcaagtggtgaggctataaaagaaaccagccctggagcccaaaccgtcctcagacggtccagtgatgggtctgtggctctacagcttgcagaagacaagttaccttcagagaggaagagactgaaggtggaagggctggaccatcaggagcagccagggcctctggaagctgatacctcaggaggctctgtgcaggctgaccccccaccgtccgagagacaggacagtgactctgaggagttgctgggttgctcaaataagagtaccctgcatgtgaccacagccccggagccctcagatgtctcctcagccgcttctcctgttgccctgcaatggccagggataggggacaaggattccccattgccttctgtacccaggactcctgggcttcactccctcttgcctgctcagccccaggatcctggtgtccctaatgctcggtcaggtggcttctttcctcccaagtacctcctcaggttacctcagggagagaacccctcaccgatagttgctgcagggcctgaaaaaggctcagactctctgtgtacaagtacacagcctgtagaacaggcccttctggttggatcagaactcggaatgctccggccacctggtgcatactcaggcccaggtgaggcaggtggcagcccagacgaccctagctggtccaggttaagggatggaaaagaagaggcacagacaggaagagagaaaagagataggaccaaggacaacatcctagtggttgggcactctcctgttccaattaccagcaccacccaggagatagcctccgttctgtctactcacacctgtgacattcgggtggcccaggatgtagtgagtaagacccatgccatccattgcctctgcacagacagcccaccagcaagagctaggacatatgggaatctcttaaacccttggacatcatcccagaagctggggataccgcccaagagtgccctagaaggtcctccttcagaaaccaaggaagggctgcctgctttcttttcctctcaagcacactatttccttacaacttttacaaaaccccaggatatttccttgaaccagcagaaaccggccttgtcacacgtcttaggaacccccaggagctgtgaggccccaagctccttcccctcacttaagactgaaccccagctcacatggtgttgcttaagtcgaagcctgcccctgcctgcagagcagcggaggatagctcctggacacttggcttcatccttgcctaatagaaacctccagggcgacagtaacaaaacactacccaagagcaatggaggaaggacccagacaagccaaggaggagaagtgtctacacaggcgcctgaggtaacaccagcttgtcctggggacagggtcagcatgacagtgagacacgaagaacaagagagagggagaggagagagagagagctcctgaatctatccttgtggatatcacctccattaggaggtcctctgctgccaagagaggctagcgctgtcatacatgggctgggaaaaaataaaggccctagatatgaacaaaactaaacaaattcatgaaaataacatagtaaaaaactattctactagagtctgagtcatagctgagttggtaaagtacttgccatacaaccatgagggccagagaatccacaattaaaaagccaagtaggatggcaggccattctaaccccagcactggggagatggtctctgggggcttagattagcctagccagtgagtctcagaccagtgggagaccctggctcaaaatataagctggatggcttctgagaaatgacactcaagattgttctctagcctccacatgtgtgtgtacatgcacacatacacacacatatgcacacacactacacctgagacttgaaagcattcttgcttctctccagggactaagggtgaggatccaaggtgtgatttaaatcttccccttcgaaattgtagggattcctgagtggtagaactatggatgatggttaattctccactcacatcaaaggtccagcatttccactggaaatccagctaggtatagttctggatggttccatgtgacacattaccagttgcctggtaagagtactgaacaggctcagactatttagtaacaacattttggtgtcttaatttctatagaataggcatcctgtctgttgagaaagagcccatcatggtggtccccaccatgagggctttgagtgacatgatgccaacatgcctggtattttcagcttccctatccatcagtcccagagctgagggctgaggaccaagtatccaggccacggtggaagaaagaacaactatggcgtagaaaggtgaagacatctcgtgaaaacaccaaacagaagaaactgaggcttcattctaaaaggtaagatatgtggcctccccttccccttccctgctagcctagtatgaggagctgcaaatggctacttagccaaaccctcaagaactgaatgtggcattaaatggcagattagctccagagagaggctcctattctattggtctggaattctgaagctccagatctgcctctgttgcccatagcccatccagcatgatcctattgaccatgtaattgcttactggtatatttctaagacagaacacagtaaatatttgagataaccaagttgaaaatccatccatccatccatctatccatccatccatccatccatccatccatccatccatctatccaatgataagagagtatgtgttaattattgcttttcagacttttttttttttttagtatttgcaagaaatgtgtatttttgcagaaaaaaaaatccagagaagcaaagagaatctttcagcaatcccaaggcttggggatattcttctaaacattcagaggcactatttctagacaagtccagaggcattttttaggaggctttaagagctcagcaacagctctcatgctaagtgtatcaagcaagggggtctgtctaaaaatcataaaaatcagatttcatgtaagtgtctttattttccactcatctgaagttatcagaattttgaggacacaagacttgtcttcttgagtggccacagctggccagagacaggtagtagccaccctgataggtaagagctgttttttgaatatcccagttccctacctctcttcagtactggatcctcagctatgtttctcagctatcttacatgcctatctccacagacaattaaatttgaagatctttatcttaatagttgaccttgagggaatcaagagagggcatctttatcaagaaagtgctttaaaagatcctcaaagttgaatatgtggagttgggcacaggggagcaaggaagctctgtacaaggtccttgtcctagttaccttttaattgcttgataaaacaccatgaccaaggcaacttataaaaacttataaaaaaaaagtacctaatgtatatatatatacatacatatatatatgtatatatatgtatatatataatgtatcacattcgtccatctatctatctatctatctatctatctatctatctatctatctatctatctatctatctatctatctagttgtccactatccatcttcctgacattgttgtgaggtattacattatgtgaatgaggctcacccttctttgatgcttgttaatgttagctgttttgaatcttcaaatgatgaatataatatataggatcctgtgagagtctagatagtatagattctttacatgttaaaagctgtgtatacattcttctgtctagcatttagtttttaaagccattttattcatcttggcctatggaattgacccatatttcatttctgaatgcattttggatcatccttctagtattttcttcagaattcctgcagaaaagaatactgccctggctgtcatcagtttgaaatagctgcattcatcctggtgttgggcagtatttcttctggctacagggctctagataaacattcctcttttgcttgggcatcaaggctcttcttccaccatctttagtttctgttttgttgaaatctgccatttgccacttctctgtctgtggaatgtctttaggtttggttgctgctaaagctgtttctttagtgtttgtgtttcaccactttactgtgacacttggagatagaggttacactttatgtagcccatccagaatctgctgggctttgatgatcttcctagaaaatcctttgcccatcatttctcaagcaccatttccaccccactctctcctttccttcgaaacacagaaaagtaatgtttcttagactttttcttctgtgtgtgtgtgtgtgtgtgtgtgtgtgtgtatgcatgttcttgtgtgtggtacatgtgtatgaacattcacatatatgctggtgcatatgaaggccagagatatatatcaggtctgttctcagcttcactttatttttgaggcaggctttcttactggcctgtaccttgcccaggcttctcctcatgtgtgcttccccagagctcagattacaagtgcatattattattcctgtttgttctttggttttgtatgtgtgtcctgggattacagctcaggtatttgcacagcacaggtcttcatgtttgttcaacaagcactttgccaactgagacatctctccaacttttttttttcttttttaaaacagggtcttactgtgtagcccaagttggcctgcactggtgattctcctgcctcagcctcctgaatatggtcttacagaatgcaccaccagacccaacttgcatgtcttctacctttaataattttggtgtctctatggctacacaatgagtggtatacttaaaattttactaatttccttaattcattaaataacttctctgttgaagctttattaatgtataattgagttttaataaattgcatatctttaagacatgtaattgaattaattttgacataaattcgtaggatgccaaaggtagaaagtctccatcatgtctttataattcctctcttctcttcaacctgcctctccttttcccagtgaactttaatatgcttctatcaacgtagatttgattgcttcttctagactacaagagaaacaaactcactctctctgtgtgggagttgctcttctctggggttagctctcccagacaccttgattatcttgggactcatcgattcactgggtttaatttctgatgctataataaaacatgataaaaaatgccaaaaatcatcttaagggctaaagaatttatttcagttcacagttccaagttatagtctcttgtagcagggatgtgaaggctacagtaacttgaagcagtgctcacatgactgtcacctgacacccaccttcaagggcagagagaaaggaatgcatgctccctcactgctcacttgcttgcttgtgctggcttagcttgagtttttcactcttacacagccctggactcaacaccaggaagtgatgtccactctgggctgggtcttcccaggtcaattaacataagataatcccacatagactgagtctccagtcaacctgacctaattaattaattcctcattgtgattctcttcctaggttattttagggtgtattgagttgccagttaaaggcgaccaccacatccatgttgtatgcataaacactttaccccttcttgatcgattcatatgactgaggacggctggggttcagctcatgtttaggtagtcatatcggtgaaagtttcagaagctaaacccatggagtctcaactacatgactgactaaatatttttaggtttgttttttttttttaaagacaagtgccctctgaatgtgggactgtgggtatgtgctgccatgcctagcccaaataattctcttatttacttatttagattcttgggattaaatccatacaaatgccaggcaaatgctccacactgtgctacatcctaattaccagtttttatttccctcatgctatatcttaaagagtaatcatcttcaattttgacgaaatgcattttcttcctttccccttttcgttgtgttttctctcagtgtaaaatatctgaagtttctttctgaccaaatcacacatttctcctaccaccctgtacctcaggctccacacctgagcctgggatccatgttcacttcgctctatggtatgagttatggattgaagctcagagttttgcaggtagccatgtgctagccctaacatgatttatttgtctgttttgatgcaaatatcacaccattttgattataacacttaaaccgaagagattctatgtgaggctggtgaattcaaagcagcatggtacttctaccaggatagacagagactgattagagagaccaggaggtgaagagggacttttgataagttttaaaggaaaatcagtggggaaaaggagaagggactgtctttccagccaacagtgcccagcctggaaagcagaaggaagctttaggtggcgatctcgtcggattctgctctaaggagcagcaactttatcccacagtgcctgtcagtccatacattgtccagactgtaagtcaaattaatcatttctcatctccaccagaggtctgtagcctcccatagcggtttcctattcattgacatcctgtctttactggtctgaccttttaaacagttttattacatttatttgtttgtttgtatgttctgtgtttaggtcagaggacaatgttcgaggcagggtttcttattccactgtgtgtgtcctggagatggagcttaggtgattaggtttagtagcaacacctttacccattgagagagtttcactaatctttaaatgtagttgttcctggatattaccttttatctgcaagaagcacatacatacagaatatgtcccctcatccttagaggtggggtctcactgcacctggagcttgtgaattcagcttggctgtctggcctccttccatgtccaactccccagcatgggcatagcaggctcccacaatttggcttttgtgctcatgttgaggatctgaactgtttagcatggcagataccttgttgacttagccatctctccaggccctcagttctttaaaaaccacacgttagagtttgcacttgatgatcccagcagttaaagtccctcatgcctgcctctgtttacatattaattctcacttacagcaactgagtgccctgtgctcgtgatatgggaacactgagatctgggctgaaagcacacctcttggagtggagtggagacgacttgttttgcttctactaactctgctaggctctagtctaagagaagctcttgaagttaaggttttcctggtgtcagcccacaggaatcagggaaggtctcttctgtttatggaaccaactggaaggatttcttctcattcccgggggggggggtgtgggctgggggcactcacttttcagtcacaagcgtggtaagtgcatggcttgccaggggcctgaggtctctgcaacaataagaactccccccttgacatccactaaggtcctgtcccacccagctaggggacatatacaggaattacctggtctggagaaaccattgagatgaaaacagatttacctgctcaggttttcttcctttacaatgttaatggttttgtaccttccaaccagactatcaatacttttaaatctatttaatttttaacaacaacttaacttgtagttcagttggttttggtaaggagggctgtaatgggaccacagtgttaggtgagggctctgaacccaggagatccggctagaatttatttgctgtgtgccttcttgttaagaagttgttttaattcctaatatttttgaagctctgactttgctaattcgatcaagccaatctagacttttgatggggttcttaagcgctcagcatctgtgtgagaagttgcccacttcaatgtatccacgaagctgccttttcttcttcagttactcagtgatggtctgtcaaggaagtctttcctaattcagtctcccaatgtcatgagcaaataaagacttcctctgatacctttctaacatacataagtatacacagtcatatatatgtagaaggatttggttttatttttgtgatttagacaaccagggagcatggatcaaatgtgattttttttaaatttgttttatctagttataacataatgtttttgaaactgcatatatgctattagattacacatacacatttcacatatagagattttatttgattggaaaactctaaaacataatgtagaatttacatcagaatcaagggtccctcagctgtttgctgtttttagctccccgtttacactcaaagttcatttcggggcctttccgttcggtttcatttctctctccctctctctatcccagtgctgtgatgagaatggttccattaatgacaccgctcacgttaaaagaaagggagtcgaaaatacggggtccattttgagagcggtaatggaaacatgttgaagcttcttgctggcatgactaattacttagatgttaactcgaggcacagagattcacaaagttctcggaatacatctgtgccaggcccacagcaagcactggaccgtggaattgggttttgttgattaatttgtggctgtgtacaagcatgaagcgctcagagacttggctgaggaagcatccaggaagtgctaaatagatagcccccacagaggggagatgacaggtgtgtgtgtgtgtgtgtgtgtgtgtgtgtgtgtgtagggggctcagtcctaaagggcacacttggccctgaggacaggattctagtcatcatgaaggtctaccttgtgcatttgctattcttgtcttcagtcaagatggaatttactcagttgagaagtctgtgaggtaagatccacagtcaggtggacagtgggtctgagctcaggtggcctttgctgcctatgccccaccccacacgtgactgagaccctgtgacccgttggccacagccctagggctttgagcatggtcacagacacctctcagcttctctatgctttgacatgtccttagagccatgaacggaactgggagaaacagcaggacctagctctcccttggatgagcacgtctgaggccggcctgttcacccacttgccaggcctctccttagatctcactacagcagtatgttagagcaacagcagggctgatacatttcagctcgtcaagactcatgtcagtaacctcagccctcccagctcctgagtgaaccaaggacctccactccaaactgaagtccacaggctcatgatcttaacctagcagtcttcaggaatccctgatgcactgacctgggcaagaaacgctcactgtgactggtctccatgagaccaaggagcacagctatcctgaagcacatggcgaggacccagaggaagcagaaaggagtcttgcgtggagcctatggttcaaaatccgaaggggctgctttttaaaagtatgaaggagaaaatgggtcagcccagtgtcacagactagatgtgaacttagaaaactaagttgatctcaaactcagccttgaataggcagaagaacagggagtgagggaacaggccttgcatcatgtactaagtagatatgcacgtaggactgtgtgcatagcctcggtccttcaaaccagagcaagcatcctgagagcaacacccacgccaacacctgctggattctttagaaagtggggcttgggttgtaagtgagctcttaggacgaggctgtgaagagccagctgaaggcagggaaaggggtgtagagacacttaaggagtctggcctcagcctgggccctcaggacctctgaagtgggacttgtactgtacagatcatcctactttgaggtaaacatgtctgaaccacggtgcccccacaccagccagtcaggtgggaagtttcccaggtacgcacaagcaagtcaaagtccccgctggaccagagggtatgcacatccccaacgcagtggtagagatgggtagccccagggagaactgttagatggaacttcacagaacctggcatgccttagggttccctgaatgacagcagatgaaaaactgcctaaccaggtttttttttttttatgcagttgcatgtggggaggtaggggccctacacatagactcctctgaaaggattaagagagatggggacagctccagcccaaggctaaacaaagtatatatacaggttctccccaagtatgatagggtccagatcccactttgataaggagggccaggaactctactgacagaccctctcacccctttgattgaatgtagtctccaaggttcaggatgtgtgctgttcataaagactgcaagccagctgcagtgaccagtggtcttgggggcaaaggtgagcctgcatacttactggctgggtgacccccacaggtcccacctcccttctttcttttgtgtgctttgaaatcactcagcaggagctccagtgggctcagggggttatgatgagtgaagtagcagcctgccttccctcccctgatagctcttcggataaatcttgacaaatgggacagtggcttcagagctatcccctccaccctgaccccagaggatgacagctcctggtccaggctgggaaggcaagtttcttcaaatgtagacacccagtgaagaacaaaaaaacactctctcacggctggtgccaagagaaggcaacaccctagggcatgctgctgtgtgttgtttttcagtcctgatttaaaattcctagtcagccctggtggttgggtcttggaggaagctca

SEQ ID NO: 1663 - DNA, 3066 bp, Mus musculus
atggaggcgtcagaaccgacccaccctaccccatcggccacggaccagccagcctctgtacccggcattccagggggcctaggggggcaggcctcacctcgcctgaccctgggtcctgttatcctgccaccagagcagggcctggccccaactgtgttcttgaaggcattgcctgtccccttataccacacggtacctcctgggggcctccagccacgtgcacccctggtgacaggcagcctggagggggccagcgtacctttcattctcagccccttgctgcagcctgaaggacccagtgccacccaggtgggcaagccagccacccccgccctgactgtgaacattgtaggcacattgcctgtactctcctcgggtgtggggtctgcactggtcagcacaggcagagtgaagaatactggtaagtacctgtgcccccactgtggccgggactgcttgaagcccagtgtgctggagaaacacatccggtcccacacaggtgaaaggcccttcccgtgccctacctgtggcatcgcctttaagacccagagcaacctgtataaacacaggcggacacaaacacatctcaacaactcccgcttgtccttggagtctgaggggagtgggagcagccttctggaggagggagacaggcccggagagaccgcctcagtggatagtcgtggagatgaaggtgctccagagagagccctttccccaggtgccctccccgcccttgctgctcagaacagggaaaggaaggtggaatcggctccctctctcggggccaccctttcccacagggaggcctctgcggatcacactcagatggtgtcacctgagttttcactagccagcccgcagcctaggcggaagctgccagaaccaaagccatgcttcctgcagcgacagcaggagacctgttcagagaagccctgggaccccaaggccttggagggccagctgaggaagtgtgagagcacagactctggctacctgtcgcgctcagacagcgtggagcagccccctgttgcctctagcccattgcatagtctatcggagcacagtgcggagtctgagggggaaggaggccctggctgttcctcttccggcaacagggctgaacgaggaaccccagggcccagcctggagttagagaagaagaaactggaggaacgaattgcccagctcatctcccacaaccaggcggtggtagatgacccacagttggaccatgtgcggccccgcaagactgtgctgtccaagcagggcagcatcgacctgcccatgccatatacctacaaggattccttccactttgacatccgggctctggagcccagccgcaggagggctgccctcagcccggcccgctccaccttcacacccctggaaaaggccagacctctctttttccactcagtccccacgcagctctccactacagtggagtgtgtccctgtcaccagaagcaactcgctgcctttcgtcgagggttctaagttgtggccagagcaacgggacccacaggatgctgtcccaggaatgcagaaggccctgagccccaggcccaccccagcccggctgggatgccgcccaggactgaccttggcaagcatctccagtggtcacccacgggccctggtaagacaggctgctgtggaggacctgccgtgtaccccgactggagacccttcagccgctgctgaggaactagatggaaagagagctgtggcaaaggagggtgtggtgtacaagggcagagccagtaaaaagtgtagccagaggaagcaaaggatgttctcccaggagaaatggcaagtgtatggaaatgagactttcaagagaatataccagaaaatgaagaccaaccaccagggaggacagaaacacaggcaggggggaggaggtgaggatacaggcctgtctcaagacagtaggatccctatccttggagacactacagcaggatgtaagctagagtcttggggaagtagaccatccctggaagactcactggaggctgagtctcctaagcaactgaaggtggtgaccagagtcaaatcatctcctaccctcggcagcacagatagcctctgtttgagtggcaagagctctttgctctctccaagtgggaaattagatctgggatgccagccgcctccggtgcctacggcttgccaagcaggagatttagaagctcccgagactgcttcaccagactcaagtggtgaggctataaaagaaaccagccctggagcccaaaccgtcctcagacggtccagtgatgggtctgtggctctacagcttgcagaagacaagttaccttcagagaggaagagactgaaggtggaagggctggaccatcaggagcagccagggcctctggaagctgatacctcaggaggctctgtgcaggctgaccccccaccgtccgagagacaggacagtgactctgaggagttgctgggttgctcaaataagagtaccctgcatgtgaccacagccccggagccctcagatgtctcctcagccgcttctcctgttgccctgcaatggccagggataggggacaaggattccccattgccttctgtacccaggactcctgggcttcactccctcttgcctgctcagccccaggatcctggtgtccctaatgctcggtcaggtggcttctttcctcccaagtacctcctcaggttacctcagggagagaacccctcaccgatagttgctgcagggcctgaaaaaggctcagactctctgtgtacaagtacacagcctgtagaacaggcccttctggttggatcagaactcggaatgctccggccacctggtgcatactcaggcccaggtgaggcaggtggcagcccagacgaccctagctggtccaggttaagggatggaaaagaagaggcacagacaggaagagagaaaagagataggaccaaggacaacatcctagtggttgggcactctcctgttccaattaccagcaccacccaggagatagcctccgttctgtctactcacacctgtgacattcgggtggcccaggatgta

SEQ ID NO: 1664 - protein, 1004 aa, Mus musculus
MEASEPTHPTPSATDQPASVPGIPGGLGGQDRLTLGPVILPPEQGLAPTVFLKALPVPLYHTVPPGGLQPRAPLVTGSLEGASVPFILSPLLQPEGPSATQVGKPATPALTVNIVGTLPVLSSGVGSALVSTGRVKNTGKYLCPHCGRDCLKPSVLEKHIRSHTGERPFPCPTCGIAFKTQSNLYKHRRTQTHLNNSRLSLESEGSGSSLLEEGDRPGETASVDSRGDEGAPERALSPGALPAAQNRERKVESAPSLGATLSHREASADHTQMVSPEFSLDQPRRKLPEPKPCFLQRQQETCSEKPWDPKALEGQLRKCESTDSGYLSRSDSVEQPPVASSPLHSLSEHSAESEGEGGPGCSSSGNRAERGTPGPSLELEKKKLEERIAQLISHNQAVVDDPQLDHVRPRKTVLSKQGSIDLPMPYTYKDSFHFDIRALEPSRRRAALSPARSTFTPLEKARPLFFHSVPTQLSTTVECVPVTRSNSLPFVEGSKLWPEQRDPQDAVPGMQKALSPRPTPARLGCRPGLTLASISSGHPRALVRQAAVEDLPCTPTGDPSAAAEELDGKRAVAKEGVVYKGRASKKCSQRKQRMFSQEKWQVYGNETFKRIYQKMKTNHQGGQKHRQGGGGEDTGLSQDSRIPILGDTTAGCKLESWGSRPSLEDSLEAESPKQLKVVTRVKSSPTLGSTDSLCLSGKSSLLSPSGKLDLGCQPPPVPTACQAGDLEAPETDDSSGEAIKETSPGAQTVLRRSSDGSVQLAEDKLPSKRLKVEGLDHQEQPGPLEADTSGGSVQADPPPSQDSDSEELLGCSNKSTLHVTTAPEPSDVSSADVQWPGIGDKDSPLPSVPRTPGLHSLLPAQPQDPGVPNARSGGFFPPKYLLRLPQGENPSPIVAAGPEKGSDSLCTSTQPVEQALLVGSELGMLRPPGAYSGPGEAGGSPDDPSWSRLRDGKEEAQTGREKRDRTKDNILVVGHSPVPITSTTQEIASVLSTHTCDIRVAQDV

SEQ ID NO: 1665 - DNA, 24990 bp, Homo sapiens
agccttgtcagcatgtgttgtttcctgactttttaataattgccattctaactggcacgagatggtatctcattgtggttttgatttgcatttctctaatgaccagtgatgatgatctttttttcatatgtttgttggccgcataaattgttttcttttgagaagtatctgttcatatccttcgcccactttttgatggggttgttttcctcttgtaaatttgtctaagttccttgtagattctagatattagacctttgtcagatgagtagcttgcaaaaattttctcccattctgtaggttgcctgttcaccctgatgatagcttctgttgttgtgcagaagctctttagtttgattagatcccatttgtcaattttggcttttgttgcaattgcttttggtgttttagtcataaagtctttgcccatgcctgtgtcctgaatggtattgcctaggttttcttctagggtttttatggttttgggttttacatttaagtctttaatccatcttaatttttgtataatgtgtaaggaaggggtccagtttctgctttttgcatatggctagccagttttcccagcaccatttaataaatagggaatcctttccccattgcttatttttgtcaggtttgtcgaagatcagatggttgtagatgtgtggtgttatttctgaggtctctgttctgttcccttggtctatatatctgttttggtaccagtaccatgctgttttggttactgtagccttgtagtatagtttttctcattctgtgaagaaagtcactggtagcttgatgggaataacattgaatctataaattactttgggcagtatggccatcttcatgatattaatttttcctttccatgagcatggaatgtttttccatttgtttgtgtcctctcctatttccttgagcagtggtttgtagttctccttgaagaggtcctttatgccaatcttattctgcatgccagcccaggcttccctgttctctctgtctttcttcactggaaggaatatacttctcaactccttgatcttgggtgaatccctccatctctcagcgccttattcctcttgttagattaataacagcacctccctgctgcgtggattagatggcttagggcatgtgtagaccttgggcctgtggcctggacatggtgtcacataaaggtcagctccctgtgctgtgaacctgcaaagcttaggcagaagatgtctcaggcagatcaaggtaatactgatgggcttgggaaaaagaaaaagagaaaattagctgaataattttcagcagatttttcccattttgcattatgctgtgatcagtgcttataggtagcatctgtttaatcctcgttatccacattttacaaatgaaaatcctgaggttagggaacttgctgagcttcacagggagggggtaagtggcaaaaccagaactcaaacccaggcttttttcttcttccaccaagaagacaggggacggggatggctgagcgcagctggcaggccctccctcttgccaaagccaacctgacatcaagcttctccttccacacatctgcaaccgattgaccatctacagggaaaccacgtaatttgtgtatgaaaattaggcaattgcaggggacactcctctcctccaacttgcctaagctttctgcacactgtgtgtttgtttgtaaactctcttctggcctgctcctttatcataattgtttaggcaaaacatattttgtcactaaacagaatgaatttgggtgaagtcatagtgggaactaacatgtgtttggccctgacaggaagtgggcagcctcccctgcttttagggaggcgttgtttctaaccagctattctcaccctcagagacccttccagacccttctagaatctgacaaaagttagggctgctcttgctctctgggaacattcacctgcgcacataaggtaagttgtaatttccctttgggtcctggctggcctagatgcacattcaagtgggtgggcgactgagaggggtttcaatgtggggccatttaccaagtgtgggcctggttctgggaagttggggcacctgagggctggcagcagtgggggagtgttacccactccaggcatgagaggccaacgtgggaaccgtggttggacctagagagggccacctaacgaaagtctgtccctgagtagagggacaaaggccaccttggagccaggcctgaccttaccctcctgcctggacttgccagcacctccctttgggcaagcctagctgggtgctagtggactagggagcatgttgctgcagccttgcaggtacagggtctacaccaagggtgtatcaggtgaagactgtaagttaggcaggtgcttttcaaagtagaggaccataccactcaggtgtgcgagagcatgcatggtggcctacagatacatatttgaaaaattttaataggtatttatgttaatggttcgtagggaaaattgatcttctctttttggtgatgattgattcagtatccccaccgcccgcttttatgcccaattattacaagtatttatttcttttggccccctcgttcctgcagtaggcaaaacatgacatcatggtttataccttgcatttcttggctgatgaggataactatcttttcacatctcttttaaaaaactgttttgatttaaaacaattttcgaagttaatagacaatttttaagagtagttttaggtttgcagaaaaatgaggagaaagtacagagacctcccatccacctctttcagcctgtgtccccactgttttccctgttgtgagcatcttgcaaatgagggtggtgcattggttgcaactggtgaacccactgagagacaccaaagtccatagtctacactagggttctctcttggtattgcatgttccatgagttttgacaaatgtatagtggcaagtatttggtattacaggatcagaacaatccctttcactccacccacctcttcatcccctcctcccccaacccctggcaacccctgaccttttcactgtctccatagttttgccttttccagaaggtcatacagttggaaccacacaagacaaagtcttttcagattggcttctttcacttaggaacatgcatttaagtttcctctctgtctttctgtggcttgccagcttatttgctagcttatttctttttatcgatgaataatattccattgtctggatgtgtgtttactgatgtttactgaaggacatcttgctcacgtccaggtttttgcaattacaatgctgatgtttacatcagtgtgcaggtttttgtgtgaatgtcagttttcaactcactgggcaatgatatagttcctcttcctccctcccccctttttttttactttctgaaaattgcgatacaacatacataaaatataacactttcaccattgtgaagcatacagttcagtggcatgaagtgcattcacattgcatgcatcccttttaaagcaatggtgttctaggcatgaggctctacacaggtagggtggggactgagtaacagcgtaagtggtccccatacgtggcggagtgggtgatggtggtccaggatgaacggaagtttgggaaacttgtaactacaccagccatcttagtacccaagttctatctgctaaacgtatccaatatgcttctccatggccttctctttcggggccctaaatgtaaattctaaaaacctacttatggcattttcatgttctctctttgcccaggctcatttgtggtttgcttttgcaaaggagggcttgggaaattgtcacttcttctcttcaagtttctcccacctctttgttcccctctcctccataaagctgcacatttgcgccaaaagatataactgtttgtgggggggaattgggaggaggtggggagctgcacacgcggcagatgagggatgcgccaagttccctgcgtgtgggagcctggggatggcaacagggtgagggcttggcattcagtccaggtgaccaaggggctgtcccggacccttccctcgctcaaagaggtaagccttctagcgagctgctttcccagccccggcccccagcttccccatcagtccaatggggacaataggacttgccatctccttgattcagagtgagcaaaattatctgcagctttttgaggttttcctgagaaaagcgtcatctccctcgaggaaggtgttagtcagctgtcatcttgccagcagggatcagctgttactcaaaggcgtcaatttcgcagtgatcacagaacaggctgcagagagcacaaaatgatcatcgtggcaggtgtgtcggaaacatagcgctcttttcctggcatttctactttgaagccccaagcctcccaccctatgagagtcagttctgggctccttttcctcctccccctacccccaggttgggctaaagtttttggggggcacatgatactcagccctcagctccccaggcaggcccccactgagacacccctcgggtgacaaccccctcaatttggccccattttcccagtcacttcagggcctttctgggtgctctgaaattcgtcctgcagcgagagctctgcgtgtgcctcgtcctcctgcctggacgcacactccgggctgttgatgctctgtgtcctggcacccctctttccagactgccctggggaatggagcaggaattgccactgaggcaggagctggacggacttatttctcccttcctcccttccgtgacctccccacccatgaccattataaccgggggatcaggacaggaggcttgtactcatccagtttccttagggtttggggcttttggaattaaaacgcctttactgagtttctgccacaggaagacagaagccctgctcacctattctccgactcagcatttaagagccaactgcaggcagtgcttctgtgtctgatggctccctgtggccacagagcctaccccgtgcattcatgcgtgcagctggaaatgccaggacatggctgctcccacaggcagtcccgatgcaggcagctcacttgcccctggggtgcatgttctacatgatctcctggtgtcccccagtgggattaagctccagtcacccacagtggggacttgctggacattttgtagcctccttcacccccagccttcccatttccttacaagtgtttcctgggatcacctcccaaataaaatacttgggaatggaatccttttctcaggaacccaccccgagacagcatcccttgctagaggcgatgcatggagactgctgagctgacggatgggggaagagacaagggtaggaggaagacagggtgggggaggaaccggtagttaatagttcaaaatattatggcgtataattgaaaactgaaataaatggagcgcttactctgtgctgggcacagcacttggtgttttcacataacttatttcatctgaacctcctggtggctctgccccaatgccactgttcttagagatgaggaaacagtctcagggccaccctctagcaagatggttaagcagagacagaaattcaggcctactggtctcctggggaggttcctgaaattctcagctagtagaaaggttgcagcgtcttgaggtaagcctttatcttccattcctattagctcttatccgttctggcagctacctgttaatctctaaagattcctgcctttacatctttccttaaacaattagaacgtctcagattgttttgaagccaggggctcttgcagatggcctagtgtggtgaggttcataatgagaccagaggtttaggagagggacagagagtgggtgcaatggtcttctgggtcctcccttctgctcagtgatgtgctggtaaatgttgagactggctttcaggatgaaaaaaaaaaaaaaggactgacttgtagcatttgctgatttttgtggtgtcagtgcttccactgtggccagttcaagctgtgaacatgatgctactgatgctgaggttgggaagagccagaggtgtgacgttccacactgccaggaagcgttcccaccacaccagcacatcccacataaatggccccaagatccctgagaatggaagatgccatagaatccttagcagtggtgagctctgagtatgtaggagctggtgtgaactggatgtttcttccccccagctccaaatctacatgtaaaatcctcactccccatgtgatggtattaggaggtgggtcctttgggaggtggtcaggtcatgacgtggagccctcatgagtggaatgagtgccttataaaggggaccccagagagctccactggtctttccgtgatgtgagggggcagcaagaagacggccatctaggtaccaggatgcaggccctcaccaggcactgaacctgtcttggacttaaacttgatcttgaacttcccgtctccagagctgtgtgaaataaatatttgtcatttaagccacccaatctagggtatttttgttatagcagcccaaagtacttttaaaaaattgagtacctttgctcaatgaagacaatactttaaaaaaaaaattgagacagtacctgtttacaattgaggtaaaattcacataacattaaattcaccattttaactatttgaaagtgaacaattctatggcacttagtacattcatagttttacaaactaccacctctgtctggttccagaacattttcatcaccccagaaggaaacgttgtacccagttaaagcctcattccccattctccccctcctctggcaaccactataatttgttttctgtttccgtgagtttgtctattccagtttcttcatacaaatgcaattataaaacacgtgatattttgtgtctggcttctttcatgcagcatgacgttttcaaggtgcatccatgttgtagcatgtgcaagcactttgttgctttttatggctgattacgattctacggtactgtatattgccgtttgtctatccactcatcagctgatggacatttctgtcatttctctcttttgactattttgaataaagctactgtgaacatgcacgtacaaatttttgtttgaatacctgttttcaattctttggggtatatacctagacgtagaattgctggatcctatggtaatacatgtttaactttttgaggaactacccagttgtttttaaagtggctgcatcattttatatccccaccagtcgtgtttatgggttctaaattctccacatcctcaccaacacttgttattttattgcttattagtttattattattatttaccatagccatggttggtgtgaagtcctatctcattgtggttttgatttacattttcctaatagctgatgggatgaagcatctttttatgtgctttttgggcatttggagaaaaaaaatctattcaagtcctctgctcatttttaaattgggttgttacaaaaattatctgggtgtggtggtgcacgcctgtagtcccagctactcaggcggctgaggcatgagaatcgcttgaacacgggaggcggaggttgcagtgagctgagatcatgccactgcattccagcctgggcgacagagtgagactccatctcaataaataaataaataaataaataaataaattgggttgtcttttgttattgcattgtaagagttctttgtatattctggatatatcatgcatataatttgcaaatattttctcccattccgtggactgttttttcactttcttgaaagtatcctttgatgaaccaaagttttagattttgaagtcaaatttatttttcttttgctgcatgtacttttggtgtcatattttaaaatccattgcagccgggtgtggtggctcatgcctataatcccagcactttgggaggctgaggccagtggatcacccgaagtcaggagttcgagaccagcctggtcaacatggtgaaacctggtctctactaaaaatacaaaaattagctgggcatggtggcgcacacctgtaatcccagctactcaggaggccgaggcaagagaatagcttgaatccaggaggcagaggttgcagtgagctgagatcgcaccactgcactccagcctgggcaacacagcaggacgccatctcaaaaaaaaaataaaaaaataaaaaaataaaaaaatccattgctaaatccaaaaaagtcatgaggttttaatcctttgtcttctaagagttttataactttagtgcttacatttgagactgtaatcaattttaagttatccagttgtcatttatttgtttttaacattatttgattgtaagtttatgtaacgtatcttttaattagggctgtgtttcacagctggcttgcgcaatttttgaaaatttaacaatcagctctcttgagccagtatgagtggtatgagccagctcaatgtgctgctacttctatgttttttattatttttaaatttttatttatatattttttgagacagagtttcactttctcacccaggctggagtgcagtggtgcgatattggctcactggaacctccacctccaggattctagcaattctcctgccgtatcctcctgagtagctgggattacaggctcctgccaccatgcccggctaattttgtatttttagtagagacggggtttcaccgtgttggacaggctggtcttgaactcctgacctcaggtgatccgcccgcctcggcctcccaaagtgctgggattacaggcgtgagccaccatgtccagctgtgctactacttccgccacaccctgcttagaaccccttactgctaacggctggaatgtggttgttttcttggggaacggagctggggatgggtgaaatgtgcttatggagctccttggtgatgggtatctgtggaaaaaggatctggggacccctgattctctagtcacaggcctgtccagaatttccttcttgcatctggcttttcctttgtgatgtgaagagcatagctggacctctcttgctccctcccctaggatttgccaagctactcctcctggcttagagggaaccagttttgtcctaactcagtctggaggggctttggaagccccacctttgagcagagacctaagtcttgtcttgaggctgaggaagtgctccttttcctagtggtgtcaccagatcaaatacaggatgcccagccacattggaatttcagataagcagcgctcagtgtttccgtataagcatggcacgtgtgagatttgggacatacttataccaaaagtaattctcatgcaatatttgggacatactcccactaaagaactatgcattgtttatcaaatttaactgggagtcttggatttttgtttgataaatctggcaagcctttccttgcgtcagttttttttcttgctgtcttcatcctgcagcagagactcagaacctcagagtgggaaggccctgattccttgcccattttgcagatctggaaacagtcccagagaagaaaagggatttgtgcaagtgcacggaatcactgtgaacttcgaggaccttgaacaagctgcatgactttttcatgaagtcagcacactttctgagtgtctctgcatgtggcactgtgctggtgccaggggatgatggtggcaaacctgccatggacctgtgcagatggcatgttaaataagagacaggattcagacagatctgggtccaaatcccgctttgccacatgtcagcttgcatgacaagttacttcgctgtctgagcctcagctttcccttttggatgagagtaccttcctctcgcttgggatgagagtacattccttaggggattgtcaggcttccgttgggtgatgaagtgcttggtgcagggtaggcaagatttactgcatgaggagagaggagaggtgcccatggtaaagtttggttgttgtctgcaggttttccagcattgtgggccatccagatgatgcggaatggaggttccagaacccacctgccctgcccctcctgcgagggaccagccagctcccactcctggccctccaggggccccaggtggccaggcctcacctcacctgaccctgggccctgtccttctgccgccagagcagggcctggccccccccactgtgttcctgaaggccctgcccatcccactgtaccacacggtgcctcccgggggcctccagccccgcgccccgctagtgacgggcagcctagatgggggcaacgtgcccttcatactcagccctgtgctgcagcctgaagggcctggccccacccaggtggggaagccggcggcccctacgctgacggtgaacatcgtgggcactctgcctgtcctgtcgccgggcctgggccccacgctgggcagcccaggcaaggtgcggaatgcgggcaagtacctgtgtccgcactgtggtcgcgactgcctgaagcccagtgttctagagaagcacatccggtcccacacgggtgagaggcccttcccgtgtgccacctgcggcatcgcctttaagacccagagcaatctctacaagcacaggcggacgcagacgcacctcaacaactcccggctgtcctcagagtccgagggcgccgggggcggcctcctggaggaaggggacaaggccggagagccccccagaccagagggcaggggcgagagcaggtgccaggggatgcacgaaggcgcctcggagagacccctttctccgggtgcccacgtgcccctacttgccaagaacctggatgtgaggaccgaagctgctccctgtccagggtccgcatttgccgacagagaggctccttgggactctgcccccatggcgtcacctgggctcccagcggccagcacacaaccctggcgtaagttgccagagcagaagtcgccgaccgccgggaagccgtgcgccctgcagcggcagcaggcgacggcagcggagaagccctgggatgccaaggcccccgagggccggctgcggaagtgtgagagcaccgactcggggtacctgtcgcgctccgacagcgcggagcagccgcatgcgccctgcagccccctgcacagcctttcggagcacagcgccgagtccgagggggagggcggcccgggcccggggccaggggtcgcaggggccgagcccggggcgcgagaagccggcctggagctggagaagaagcggctggaggagcgcatcgcccagctcatctcccacaaccaggcggtggtggacgatgcccagctggacaacgtgcggccccggaagaccgggctgtccaaacagggcagcatcgacctgcccacgccctacacctacaaggactccttccactttgacatccgcgcgctggagccaggccgtaggagggccccgggccccgtgcgctccacctggacgcccccagacaagtctcggcccctcttcttccactccgtccccactcagctctccaccaccgtggaatgtgtccccgtcaccaggagcaactcgctgcccttcgtcgagggctccaggacgtggctggagcccagggagccccgggacccctggtccaggacgcagaagcctctgagccccaggcccggcccagcccgcctgggctgccgctcgggactaagctcgactgacgttcccagtgggcatccccgggccctggtcagacaggccgcggtggaggacctgccaggcacccccattggcgatgccctggtgcccgcagaggacacagacgcaaagagaactgctgcgcgggaggccatggccggcaagggcagagcgggcggcaggaagtgcggccagagaaggctgaagatgttctcccaggagaagtggcaggtgtacggggatgagacgttcaaaaggatctaccagaaaatgaaagccagtccccatggaggcaagaaagccagggaggtgggaatgggcagtggggcagaactgggctttcctctgcagaaagaggcagcagggagctcaggcacagtccccacccaagacaggaggacccctgtccatgaggacatatccgcaggggcaacgccagagccttggggaaatccaccagccctggaggcctccttggtgactgaacccactaagcatggggagacggtggccaggagaggagacagtgaccgacccagggtggaagaggctgtgtcatcccctgcactgggtggcagagacagtccctgttcaggcagtaggagccccctggtctctccaaatgggaggctggaactggggtggcagatgcccccagcacctggccccctcaaagggggtgatgtagaggctcccaggccagtttggccggaccccaagctggaaggaggtgcccgaggtgtgggggatgttcaggagacctgcctgtgggcccagactgtcctgagatggcccagcaggggctcaggggaggacaagctcccctcagagaggaagaagctgaaagtggaggacctgcacagctggaagcaaccagagcctgtgagcgcagagaccccaggtgggcccacgcagcctgcctctttgtcatcccagaagcaggatgccgatcccggggaggtgccagggggctcaaaggagagtgccaggcaggtgggcgagcctctggagtcctctggagcctccttggctgctgcttctgttgccctgaagagggtggggccaagggacaaggctaccccactgcatcctgcagccccagcccccgcagagcacccctcgctggccaccccacctcaggctcctagagtgctctctgccctggcagataatgccttttcccccaagtacctcctcaggttacctcaggcagagacccccttaccactgcccattccctggggaccaaggcacagccaggactctctctgcagcagtgggtggcctgaagaacgggcatcatttgttgggtcaggactggggacccctctttctcccagcccagcctcaggcccctccccaggtgaggcggacagcatcctggaggaccccagctgttccaggccacaggatgggagaaaaggggcacagttggggggggacaagggggacaggatggccactagcaggccagcagccagggagttgcccatctcagcaccaggggctcccagggaggctacctcctccccgcccactccaacgtgtgaggcacacttagttcaggacatggagggtgacagccaccgtatccatcgcctctgcatgggcagcactttggcaagggccaggctctctggggatgtcctgaatccctgggtacccaactgggagctgggggagcctcctgggaatgccccagaagatccttcttcagggcccctggtgggccccgacccgtgttcccccctccagcctggctccttcctcactgccctcactcggcctcagggtgtgcccccaggctggccagagctggccttgtcttcccactcagggacgtcccggagccacagcacccgcagtccccacagcacccaaaacccctttccctcactgaaggctgagccgcggctcacgtggtgttgcctgagccgcagtgtccctctgcccgcggagcagaaggcaaaggcggcatctgtgtacttggcggtgcactttcctggtagcagcctccgagatgagggtcccaatggccctcctgggagcaatggaggatggacctggacaagccctggagaaggagggccggcgcagatgtccaaggtaaagctgggctttgccccagggcccggggttgagagagcatgttgttatcccgtaagacctctcatgagggaaggaagtctgaagccgtcccatgtagcatctgctgttcactgcttgcttgttcctgagggaggctggggataccacatagacagcaggaaggaataaaggcccaaatgcaaaccaaaacagagttgcggaaaacataaattccaaaggaaagaattactgtactcaagacatgaggtgagatagtcttcataaccaaatgtaaaatttaactgagcttcctggtaacagaagcaaaaagtaaaatgaaacactccatcagagaggtgagctctctggatcattctaagattataagccagagactcccaataattgagagagtctttatactggggattctggagaaggaattactgttgattggactcagccctctctctgaggttcctgggggcagagagaaaagggggaaatgtggtggatgctcacaggtgttctcacttggtgaagaaatgataatgcagagctccaccttgagagggggttcacgcacctggttgtgatgactgagggcttagtcctgctctggagtggcttgggccgcggccactgaggacggtcctggaggctcagcagtcatttaacctttgtggacagtgacaaaggcccggagaccagagtcttgcaggctgttcggctttccctaggtggaacccaaagttgtggggagtgctgttttcatcttgagagtagcgggttagtcagtagggccccaggggtgtgggggctcccggggaggtggatttaggggatagtaaaggggctggtcaccgtgtttctttggcctccagttaacaccgatggcataggctttcctctgcggatcaagcccaggcggggtttcaggaggttctgtccaggaacgctctgccgttgcctggttgaacttctcaggggctcagcccgtttagcaatgcagtatttccgttttgatttctgaagacaggcatcttgtctgcagagcgagaaccctttggagttttcttcatcatgaggactttgagtaatgtgatgccaacatgcttggtgttttcagttctcctacccaacagtcccaggggtgatgccccagcaccaggtgtctgagccagaatggaagaaaggcctgccttggagggcaaagatgtctcgtgggaacagcaagcagagaaaactgaagatcaaccctaaaaggtaggatgagtggccacctctgtcatttccacaaaaccccaagaagaatttactatgggatttgaaaggtatccgtgtgctccagagaaagagttcctgtttcctagggtttagagcttcatgattaaaggactgaatttgtttcccaccccttgcaactcaccgcctgtgtattttttgatggcacctttctaaggccaggaatccagcaaatctttgaaataactgggttgaaaacacatccattcaacttaagtctggaagagagagagcctgttaattatttacagcttttattgtgtttttaattatgcaagcaatgaatgtcctttgcagaaaaatttgacaatacagatgagcaaagagaagacaataaaacatcctagtaatctcgccacgcagagataatcaccgtgaacattcaggagtgtgcccttctagacttttctttgcggtatgtgtttgcacatatccacccccaacaaacaggaggccctgtggattttcctgccactctttcattgtgcctttcttggattgtctttctcctttgcttaaaacccttcaggctgcccgttgcatacaagttgaaaagcgaattctctaacccctgccctctttctaccctcattttccctgtgatctcctcctctcctgctcgccctccaccctcatcccattctctaatccacattctaatcccagatccctgaagcatttatactccacacctcagttgtcaacctgtcaacattctcccccagactgtcagtccttttttttcttttttgagactgagtctgactctgttgcccaggctggagtgcagtggcgtgatctcggctcactgtaacctctgccttgggggttcaagcgatttgcctgctcagcctcctgagtagctgggattacaggcatgggccaccacgcccagctattttttttttttttttgtatttttagtagagacggggttttgccatgttgcccaggctggtctcaaactcctggcctcaagcgatcctctcgtcttggcctcccaaagtgctgggattataggcggtgagccactgcactgtcagtaatttatccaaagcctggatattcttcaaggggcgatccaaattcctaactttcccctgtagctgctcagaccctcagtggctagagatggcctcttctcttttggttccccctcctgccctgcctctatcaatggtctgccgggaccatgtgtccagagctaacattatggggcacttgctgtgtgccagactttccctaatcgctttctggcatgcattgtttcaggagatcccacaaggtactgcccatgatgtggatggtattattagccccatttttctcatgaggaaatggagacacagagagcttagataacctacccaaggacccagatttgaaccagccggtctccttccatagcctgtgtgccagctagtcgcttgtcttggtgcaccccagcctgtcctgggcacgctagcggcctggcattttctagatttttcttgcaatgcttgagattttgcatttctgacacagccaggtgatggtgctggcgtggcccccagagcaggcttgggggagtggggctttcctttccagcgtccctcctttctcatggatcactcagggtcctgagacagaagcctgactcaaggtagtctgaacaaaacaaggcctccctgcctgtgtaatggggcctctaagcctcatcatcagccctggcccaaacttggtggtgtgggaaggacagtcttccaaaggaaaattcgagtgctgctcttggaggaaaggggaatgcatgccatccagacggaggagctgcatgcggggctctgggaaacaagggacatcggctagtggttgtggtcctcctcagtatctcaccaataaggaggaagtgctcagttacatgtgactgatagttgatgagcctgaagcctccaggcatcattggaaagatgtggggagagggaagaggatgggttgcctcattaacagctcccactttcccaagacttcagcttgactaattcgaaaatatttaccatgtacctgctgtgtgcctggtgcccacacctggaggtggccgaggaaactttcttaatccagggtgagggtcccagactggagcccaggaggcttggagatatcactccaggacaccttgcaaacccactagcagctcttgggccaaacacagtgcatgtaagacccttattaggccagtgctctaaaacttttggcacttagcagccacataattagatgtaaagatttctcataaaaatctggatttctaacttttcttgaaatatgggaagctctgaagacactgggcctgcctccttacatggcaacagccagatggagatgagcagtggccaccccttgtgggtaagagctgtgttccctgctgcgctctctagctcacctctccctaatgtcttaccctcggccagcctctctcagttatgctctctgcctggcccccatagcatttgagtttgcaaattttggccttactagctggccttgtggaactagacggcctctccactcaacaaatcacgacaagagcccatggatgggcacaggaaggggcaggggcattgcagaacagggaggagtctgaacaaggacttagagctctaaccaagagctcctggctgggtcaaatgaggaggaagctgttgagctttttatatgcacaaacgtttattggttgatagtgatttgtttatcattggtccttttgttggctcatgactgtcttttgagttaattccagcttcaaggcctttgcacctgctagtccctctacctccatctgcacactcctcctcttgctcctcacatggctggctcccctgtctcagaaaaagcatcagcaccatgagggcatggatatctaggcatggacgtctttgaggggaggtattactctgcctaccacactgtttatccaaccacccacacacatatgtttgtagatatttatctgtccatctgcccacccacccacccacccatcaacttacatatctatctatctatctatctatctatctatctatctatctatctatctatcacgtaactccttgtgttctctcctcaagaaggaagcctacttcttgattcattttcccactttaatttcagttgtcttaatgttctacagaaaatgaaatactgtagcagagattgctctatagtccttagctcacagagaatgatacagttctcttctaagtaaaatattaccttaaatgttatataacaatatatagaaaagaaaaatttaaaagattattatgttgttttatgtatttggcacaaatcatatcaatctgtgttttcatactttgcaaatcaccaataatatataatattgtttggtgtctttaaagtacacataaaagtatcatagttatttatcatttatcattcttcagcttgatttttaaggtcaacattgtgtttttgaagatctcatcgtgtcaggacatactgatcaaattcattcattctgattgctgtagagtgtctcatccatgagtaagagtttgcccttcattcatatgcttcctaatatttgttgttatcagattttttaagtgatgaatataatttataggattctatatatatcctagatttgtatgtattatttgcctgttatatatactgcaaatatgtttccaagtctattacttgtctttttaagcccctttatttatatgtacccacataattgcccatctcttgtcttttcatttgtttctgcatgtcagatcttccttctgggattattttcttctacctaaatcatattctttagaatttcctttattagagaaggaaattctcttagtttttattactctgcaaatatatttatttcatcattgttgttgaaaaatagtttgctgggtacacaattctaggttgactgttattttctcagcacatcaaagctaccattgcactatctgtcagcttccattttgtggtaaagaaagccagctgttagactactcatctgtcttttgaaagtcttttatctctggctacctttaagatcttcttttatcctttggtgttccatagttttactttgatgtatatagatgtatgttgctttttatttgttccattaggaatccacagggctattttgatttgtggattggtgtctctctgtaaaaaattcttagccatcattctccaaatattgcctctgtcctgttccctctccttcctttctgaaatactgaaataatatatattagtccttttctatctttcatgtcttttaatacttttaataaccttgtttctctgtgctataatctggatactttgttcaaatctgtctttaaaattttaccagtttttaaatctactattttttgtaaagctttattaaagtataattaaattttaataaattgcacatatttaaaacatacaattaaataaattttgacatatatatatacctgtgaaacaatataaccaggatcatgaacatatctgtcaagcccaaaagtttcctcctatccttttgtaattcctcccttctgcccgtcctgaagtccttccatccccaggtaaccgctgatgtgctttctgtcacataggatagtttgccttttctagaattttatagaaacagaatcatacaatatatgctctcttttttttgcctggctttattcactcagtattactattttgaggttcatccatgttgtgtttatcaagaacacattccttcttattgctaactagtatgccattgagtgagtatgtcacaatttgtatacatgttcacttgttgatagacatttggtttgtttcagtttggggctattacaaataaaatgactataaatattcatatgcaaacctttgtatggacatatgctttaaattatcttgggaaaatacctagaggtgaaaagcctggatcatatggtagatgtattattaacttttaaagaagctgccaaattgttttccaaagtggttgtattattttacatctccactatcagagtatgagagttccatttctctacattattgccaacacttggtatggtaattttttttagttttagtcatttgaatagttatgtagtggtatctctttatagcttgaatttgcatttccctaacaagtgatgatattcagcatctttttttgtgtgcttatttagcatttgtatatcttctctggcgaagtgtctcttcaaatcttttgcgcatcaaaaatgggttgttttcttattgagttttgagaatttttttaatatactctgattataagttccttatcggagatgtgatttgtaactattttctttcaatctatggcttatctttctattcttttagtagcatcttttaaaaagcaactgtctttcactttgatgatatttaatttacctttttttgttatgtttttagtgtcatagtttaaaaaagtgtgtctaaacagagcttcaaagcttttcttctaaatttttctctaaagttttatacttttaagttttatatttaggtctataattcattttcacttagtgtttacatatggtgtgatgtatggatcgaagttcttatttttgtgtgtggatatcttatctagttgttccagcatcatttgttgatctatttgtctatttcaatgcaaataccacactgacttgattacgccgcttgactctgagacttattataaagctaaagtattccaaagagtgtggtttttgcatcaaaatggatacaaagatcaatggagcaaaatagagaatacagaaatagaccatgctgtggtcaattgatttttcatacaggctcaaaggaaattcagcggaaaaagtatagtcttttcaacaaatggttccagacctggaaaatttctccatcaataagttgaggtgtcatcaggcttacctcatctgtttctcttctttcatggatcactgcctttattgctcaatgtccaatgccctgaacactattgttttgtatctttattcagttttttacttgggatggtaaatctggttacttttgcaaagtcttggtcagaagtccctggcctattgcagtgcctcctagttgatctcccctacttttattggtctgctaaagtttaagttcaattgttgatgtgaattatattttatttccaaaaagttttatttaattatttttttaatttgcttgatcattttatagtctcttgcacttgactcttattttcaacctttttttttttttttaaaaaaaaaaacacatctaatgttttgcatctgacaatgacaacctatgaagtcttggcacatctgactctgttttatatatttgctctcacatatgttaacttatttccttgtttgtgttaaaatttttgactgtgagttgatatttttggaactttgagatgtgggttgaaggtggattcctccaataaatatttgttttgcttccactgggtgcctgggggtgctcgtttgtttgttgttatgttccccgggcaggtggtggggtagggagtatttatttctaattcacccacatactgagagtatgcctttcagaggtctcagctttatgcaggaaaggaggttgggtcttccatgtgcctctcactgaagaacattctgggctttgagtcctgtaccctcagctgcaccagagcatgaaaataggaaggtcatcctcatctggtttggcagattcctcaaagtgaaagcaatctcacttttccagggcgcagctctcacttggtttttgcctttgaactatttcttatcttttaatcagaacatacgtaaatttaaatataagtttaaaaaatgtttacattttacgctgcatttttaattgttttcagtataaggataaatttggtggtaatcagtcagagtattgagtccactgtgctgttggaaatggagttcttattttttaaccttgataatgatggttttttcattaagaatttgtaaattttgatgtagtcaaatggggctgtcttttcatgactttttggtatatctaagaaatctttctttactctcaatttcctactttcaaaaatatgcagatatgttatcttatgttttcttcttgtatgaattcatatatatagaaggatttatttttatttttgtttataaagacaactatggaccacgggttaaatatggtttttaacttattttaaccatgagcaacgcattatttatatacatatatatttgatcgacagggtctcactatgttgcccaggctgcagggcagtggctattcacaggtgtgatcatagcacaccacagcctcacactcctggcctcagtggtcttcctgcctcagcttctggagtagctgggagtacaggcatgcaccaccatgcctggcttggtttttatatttttaaaagcttatccatataaaaacagaagaagaatacgtggcacagattgtctgtggcatacaaagtctaaaatatttattagctggacctttgcataaaaatcaagcagacccctgcattaatccacttttgcccacttacatgttaaattttagcttcccgtttatacttgaagtttttttcagggcctttcattctgctttcattcatctctatgttttttgccaactgcaaataccacactgtaatgaaaatggttgttttcattaacaaaactacatgagttaaagaagagagattagaaaatgcaggatccacttccagagtggaaatggaaaaacgcagaaaattcatactcagaagcctaattgccctgacattaactagaggcatagagatccggagcactcacaaaatacctccctgccttgcccaaagcaagcgcgggatcatggaattagattttattgattaatttataactgtgtactgtgctgtatgaagcatgaaacattcagagacttgttcctaggaagcttccaacaaatggaacaatgaattgtgaagccccaagtgaatggaaatgagcgaggagaagattgcaggttgtatgggagaagggcactctataaaaccctaaaatatacattagtcgttgaaggggagagtggagaagaaaaaaatcctgggctttgagaatgcaattctattagcagatagtgtttttccttatggagcggatgtttatctgtctaagccatgtgtctattcactttagtcatcacacaatttacttattcaatgagatagcactctcagtaatgagagcacaatctctgcagtgaggtaaagacaaagacctacagatgtggccctgagtccacgtggcctctgctgcatgtgacccccaccacatgtggctgagactctttgtcacgttggccacagccccagagctttgacagcagtcccaggtcctgcttagcaggatacagaggctctgccatccacacctccactgctcttctctttgctttgttcttctctgtggggtcaagagaggaaagtgagggaaatagcacgtcagatctcatagtttcgccccagaaaggaatgtgtgtggagtgggctgtgtacacctgcaagagccactccttgggtctactgtccttccctgagagagcctgacaaaggtggcaagggggtgacgagtgtatcaccctcacagccgggtgcggaggtgcagcctgacgaaagtgtcctggatggggccccaacagcactggccacaccttgaggggacttgcatggctggtgatggagatgagcttgcaaaaccttcctaagccaggatgctgcttctccaggaggggctgcacacagaacgttttgggagaaccaggagagagagaaacgtaccctgcccatgactaaactaaacagtcctttgaagacattgccaaggtccacttgggctgttctcgaaggcaaaaagtttgaaattccaccttgatgaagtgcgaattcagaggcggggcctttcctagctctctccttgttattttgcgtgaggagaaagacccccgcttgctaattttctgaaagtaaaacctccctgcagttcaaactgtgccgttcttaacacctgcaagtgtgtggcagccacccactgacttgcgcaaaggtgacccagcagcaggtggaagaagaattctctccatgtgccaccccttccttcctccctttgtctctgcactttgaaatctctctccacccaggccctgcaggatttggttcaggggtttgtcgctccccaccctggctcagatagctctttcaggaacctgtgttcttgacaactgcttcaaagaacaaaccagccaccactgcctcccccaccaaactaacctcccctccccccagccggggaatgacagctcctgccccagacaggggaggcaatcatgcccagttgaggggagcttctcccaaacacagaggccggaaaagatgaacaaaatgtcactttctcattgttgctgccaggaaaaaccagtgcccaagaggatactgcattctgtagatcttatttaaaattttgtgagcggccctggtgattaggggactgcggctggatcttggcggtggctcagataaatgagaaaggaaaatagccggttctgaggagcactgtggagtagaaatattgtaaactgaggcttgtaaagggaagggattacttgtggcttgaccaggcagttagaagcagtgcaaagatcttctaaaagagcttaaggcatattgcaggcctggctcttcgtctcattcttttgcctatataatgggggtgctatactaggttgatggcctgtttgtggttgcacattcctattagtaaaataatttgtagcctgcacctattaaatgtgtatttgttcatttacaaattatacatatattctgctctatgacatgaaacaatagaaacaagaaaggacatgaaacaatagaaataagaaagact

SEQ ID NO: 1666 - DNA, 3857 bp, Homo sapiens
atggaggttccagaacccacctgccctgcccctcctgcgagggaccagccagctcccactcctggccctccaggggccccaggtggccaggcctcacctcacctgaccctgggccctgtccttctgccgccagagcagggcctggccccccccactgtgttcctgaaggccctgcccatcccactgtaccacacggtgcctcccgggggcctccagccccgcgccccgctagtgacgggcagcctagatgggggcaacgtgcccttcatactcagccctgtgctgcagcctgaagggcctggccccacccaggtggggaagccggcggcccctacgctgacggtgaacatcgtgggcactctgcctgtcctgtcgccgggcctgggccccacgctgggcagcccaggcaaggtgcggaatgcgggcaagtacctgtgtccgcactgtggtcgcgactgcctgaagcccagtgttctagagaagcacatccggtcccacacgggtgagaggcccttcccgtgtgccacctgcggcatcgcctttaagacccagagcaatctctacaagcacaggcggacgcagacgcacctcaacaactcccggctgtcctcagagtccgagggcgccgggggcggcctcctggaggaaggggacaaggccggagagccccccagaccagagggcaggggcgagagcaggtgccaggggatgcacgaaggcgcctcggagagacccctttctccgggtgcccacgtgcccctacttgccaagaacctggatgtgaggaccgaagctgctccctgtccagggtccgcatttgccgacagagaggctccttgggactctgcccccatggcgtcacctgggctcccagcggccagcacacaaccctggcgtaagttgccagagcagaagtcgccgaccgccgggaagccgtgcgccctgcagcggcagcaggcgacggcagcggagaagccctgggatgccaaggcccccgagggccggctgcggaagtgtgagagcaccgactcggggtacctgtcgcgctccgacagcgcggagcagccgcatgcgccctgcagccccctgcacagcctttcggagcacagcgccgagtccgagggggagggcggcccgggcccggggccaggggtcgcaggggccgagcccggggcgcgagaagccggcctggagctggagaagaagcggctggaggagcgcatcgcccagctcatctcccacaaccaggcggtggtggacgatgcccagctggacaacgtgcggccccggaagaccgggctgtccaaacagggcagcatcgacctgcccacgccctacacctacaaggactccttccactttgacatccgcgcgctggagccaggccgtaggagggccccgggccccgtgcgctccacctggacgcccccagacaagtctcggcccctcttcttccactccgtccccactcagctctccaccaccgtggaatgtgtccccgtcaccaggagcaactcgctgcccttcgtcgagggctccaggacgtggctggagcccagggagccccgggacccctggtccaggacgcagaagcctctgagccccaggcccggcccagcccgcctgggctgccgctcgggactaagctcgactgacgttcccagtgggcatccccgggccctggtcagacaggccgcggtggaggacctgccaggcacccccattggcgatgccctggtgcccgcagaggacacagacgcaaagagaactgctgcgcgggaggccatggccggcaagggcagagcgggcggcaggaagtgcggccagagaaggctgaagatgttctcccaggagaagtggcaggtgtacggggatgagacgttcaaaaggatctaccagaaaatgaaagccagtccccatggaggcaagaaagccagggaggtgggaatgggcagtggggcagaactgggctttcctctgcagaaagaggcagcagggagctcaggcacagtccccacccaagacaggaggacccctgtccatgaggacatatccgcaggggcaacgccagagccttggggaaatccaccagccctggaggcctccttggtgactgaacccactaagcatggggagacggtggccaggagaggagacagtgaccgacccagggtggaagaggctgtgtcatcccctgcactgggtggcagagacagtccctgttcaggcagtaggagccccctggtctctccaaatgggaggctggaactggggtggcagatgcccccagcacctggccccctcaaagggggtgatgtagaggctcccaggccagtttggccggaccccaagctggaaggaggtgcccgaggtgtgggggatgttcaggagacctgcctgtgggcccagactgtcctgagatggcccagcaggggctcaggggaggacaagctcccctcagagaggaagaagctgaaagtggaggacctgcacagctggaagcaaccagagcctgtgagcgcagagaccccaggtgggcccacgcagcctgcctctttgtcatcccagaagcaggatgccgatcccggggaggtgccagggggctcaaaggagagtgccaggcaggtgggcgagcctctggagtcctctggagcctccttggctgctgcttctgttgccctgaagagggtggggccaagggacaaggctaccccactgcatcctgcagccccagcccccgcagagcacccctcgctggccaccccacctcaggctcctagagtgctctctgccctggcagataatgccttttcccccaagtacctcctcaggttacctcaggcagagacccccttaccactgcccattccctggggaccaaggcacagccaggactctctctgcagcagtgggtggcctgaagaacgggcatcatttgttgggtcaggactggggacccctctttctcccagcccagcctcaggcccctccccaggtgaggcggacagcatcctggaggaccccagctgttccaggccacaggatgggagaaaaggggcacagttggggggggacaagggggacaggatggccactagcaggccagcagccagggagttgcccatctcagcaccaggggctcccagggaggctacctcctccccgcccactccaacgtgtgaggcacacttagttcaggacatggagggtgacagccaccgtatccatcgcctctgcatgggcagcactttggcaagggccaggctctctggggatgtcctgaatccctgggtacccaactgggagctgggggagcctcctgggaatgccccagaagatccttcttcagggcccctggtgggccccgacccgtgttcccccctccagcctggctccttcctcactgccctcactcggcctcagggtgtgcccccaggctggccagagctggccttgtcttcccactcagggacgtcccggagccacagcacccgcagtccccacagcacccaaaacccctttccctcactgaaggctgagccgcggctcacgtggtgttgcctgagccgcagtgtccctctgcccgcggagcagaaggcaaaggcggcatctgtgtacttggcggtgcactttcctggtagcagcctccgagatgagggtcccaatggccctcctgggagcaatggaggatggacctggacaagccctggagaaggagggccggcgcagatgtccaaggggtgatgccccagcaccaggtgtctgagccagaatggaagaaaggcctgccttggagggcaaagatgtctcgtgggaacagcaagcagagaaaactgaagatcaaccctaaaaggtag

SEQ ID NO: 1667 - protein, 1227 aa, Homo sapiens
MEVPEPTCPAPPARDQPAPTPGPPGAPGGQDHLTLGPVLLPPEQGLAPPTVFLKALPIPLYHTVPPGGLQPRAPLVTGSLDGGNVPFILSPVLQPEGPGPTQVGKPAAPTLTVNIVGTLPVLSPGLGPTLGSPGKVRNAGKYLCPHCGRDCLKPSVLEKHIRSHTGERPFPCATCGIAFKTQSNLYKHRRTQTHLNNSRLSSESEGAGGGLLEEGDKAGEPPRPEGRGESRCQGMHEGASPLSPGAHVPLLAKNLDVRTEAAPCPGSAFADREAPWDSAPMDGLPAASTQPWRKLPEQKSPTAGKPCALQRQQATAAEKPWDAKAPEGRLRKCESTDSGYLSRSDSAEQPHAPCSPLHSLSEHSAESEGEGGPGPGPGVAGAEPGAREAGLELEKKRLEERIAQLISHNQAVVDDAQLDNVRPRKTGLSKQGSIDLPTPYTYKDSFHFDIRALEPGRRRAPGPVRSTWTPPDKSRPLFFHSVPTQLSTTVECVPVTRSNSLPFVEGSRTWLEPREPRDPWSRTQKPLSPRPGPARLGCRSGLSSTDVPSGHPRALVRQAAVEDLPGTPIGDALVPAEDTDAKRTAAREAMAGKGRAGGRKCGQRRLKMFSQEKWQVYGDETFKRIYQKMKDHGGKKAREVGMGSGAELGFPLQKEAAGSSGTVPTQDRRTPVHEDISAGATPEPWGNPPALEASLVTEPTKHGETVARRGDSDRPRVEEAVSSPALGGRDSPCSGSRSPLVSPNGRLELGWQMPPAPGPLKGGDVEAPRPVWPDPKLEGGRVGDVQETCLWAQTVLRWPSRGSGEDKLPSKKLKVEDLHSWKQPEPVSAETPGGPTQPASLSSQKQDADPGEVPGGSKESARQVGEPLESSGASLAAASVKRVGPRDKATPLHPAAPAPAEHPSLATPPQAPRVLSADNAFSPKYLLRLPQAETPLPLPIPWGPRHSQDSLCSSGWPEERASFVGSGLGTPLSPSPASGPSPGEADSIDPSCSRPQDGRKGAQLGGDKGDRMATSRPAARELPISAPGAPREATSSPPTPTCEAHLVQDMEGDSHRIHRLCMGSTLARARLSGDVLNPWVPNWELGEPPGNAPEDPSSGPLVGPDPCSPLQPGSFLTALWQGVPPGWPELALSSHSGTSRSHSTRSPHSTQNPFPSLKAEPRLTWCCLSRSVPLPAEQKAKAASVYLAVHFPGSSLRDEGPNGPPGSNGGWTWTSPGEGGPAQMSKG

SEQ ID NO: 1668 - DNA, 44681 bp, Mus musculus
  misc_feature (1)...(44681): n = a, g ,c or t
ctaaccagaatctcgtcatcctcaaattcaattatgcataatttattgagttcccgctgcgcgccaagtaacgtgagagcaggaacaagacagtacccgctctcggttcccgacattcttagatctcccgttaactgctctctcatagctgtttttgtctcactggctcgggctgcaaacttgtcaaaagtagtgaaaaaaagtatttctttatttcatagactccaccttctctagcactttctgggaagtttctaaacgcccttgatacggtaatgagatatttagttttcccgcgactcctttcccgttctgaaccgcccttacctggaatcactaaagggaaaagaaggcagcttcttggcagttcccgggagaaacgctccttcgagagtaggaggtgggagtctgtctgactcttcttgctcaggaaaataaacctcaaatttccagcaacagcgggctggcagttgttgctaggacgcgtccgttgctaagattaaaaaaaaaaagtctcctgttgagattgacagaacgccttcaccaataccttatccgctccccaacattgtctctcatagaaggctagtgattggttgttgtgttgtgacgtcacctaacgtaatcccagagaagcccagtttcccactagcaaggaaagcactagttctctgttcgatttaggtctctgttctttgcagtggcccctcttgacttaggtccatgccttgccttgcgtccacttcagccttagtcaaagggaagttctcgtggggtgcggatgggcagctcctaggccagccacctgacctcccttgtagggagcaggatgcatctagggacctgtgtaaaattggagcgtggagtggaggttgcattcaggttgccttggacgtccttgactactgcagcacattttttgttttgttttgttttttgtttttttgtcaaagaattttgtatagagtttgagtcaagccggaactacaagtctccgagggaaagctgcctggtggttgttggttattgtaaggatcctttcatccgactgtgggccctccgggattattagagtgaagctcatctcgccagctttctgtcttttctttaaaagtacaaattaaaactgctaatttgtgatctagcaaaatttagcaaagtaatgcagttgaccacaacaatatttaaagagttttgtttaagacaggatcttactgccgtagaactccctctgtaggatggatagatggatggatcgatgtcaccacagcttaactgagccaagattaacttagtgtctttatatatcttttcaaatttctctctcccattctgttttcttattctccttccccctctctgtgtgtggatctgtgtgtgtgtgtgtgtgtgtgtgtgtctttgtgtgtgttatgtaggcaagtgccaccatgtatatttggaggtcagaagaaaacctctggtattggtctttgccttacacttggctgttgtttttatgtgtagcaacactgggattacagatatgcactaccacacccagctttacatgggtcctggggattgcaacacagttcctaacacttgcaaggcgctaaggcatctcacagtcccgtctttcatatatctttcaggttcctcccctaggtggtagcatcccagtccttttgttggcaaaactagaagtctgagagccaccccagattcctgttgccctgcccagagccaacctattactgagttttaccattttcttccttgaatatgtcactggtaatgcatctataagctgccttctgccttttcctcatttctgatggactcgtctgtcccctagctagtaacaacagtgtctggtcatgctccaccttctctctaattctacgttaccatggagcgttctgaatcaggggttcaagtctgagatcactctttttgcacatgttagggttgtgcataaaaagttgtgcaaaaccttgagcacaacctgagagactgacagctggcaggtgccaggtacctttttcttcctcagtttcccacaacccctactcgctagatgagagaagacagaggccttgaagtcctctggtctgcacgtgagcacttggtctatgatccattctcacaaagggttattttttttttgagagtttgacttcttttccacaatatattcatgttgatgtcgatttttaaaatgtgaaaagtcactgttgactaagatagacataaacttaatgaaaatgaaacacaggcagccatgacaggctcatccattttctgcagccttaacatcctgactcaggagacagcatatccccagtggcccctgctggctccccaaggatgcctcttcctcttgaaaccaagatattgcttctttttctgcctcagtctgtgtacttttctccaccttcgttggaccttaagggcttcatctctccttgctcagcccaagtgccatcccttctgcaaagccacataaacaagcacacagcattactctcccttgcttttccatttgactatcccactgtgcctctaaagtcactttacagggcatctctgctctcggctttaaggctggggtaatacctcattagcttaaattgataccatccaacactgttcctgatacagtcacacacacacacactatatatattatatatatgtatgttaaacacataatagatacataaatacaaatatataatatattacatatcatagacagtgtacatatatatgcattatgtgtaaatatataattgcttaattgcttatttcggttaaaaaagcaagagaaattaacaaaggcttttttgtattcctcaaatgatatattttcctttgaaaaaatcccccacaatcctgttagatttcaggatgaccataatcttgtgacttggctgagacacagggtttgttgtcatctttcctttagacacaccccaagggatgagtcataagtcacaatgccaagaaagttaaaaaaaaaaaagaaagaaagaaaaaaagaaatgggaagttgagtgatttcttcatgctgcagattcatgattgacacctttggtggtagtggccagaggaccgggttaggatgactagtgagcacctgtgcactctcatggattaaatttgccttaaacttgaatgtattcaagcttagttttagttttgatagttaaggaacaaggtagtgagtcacagaataacaatgggaaataacagagaaatttcaaattgagtttacagcagaaaatctggtaagtcagagataagggtgattttttactaattttgttttttaaagagcttggggtggagggctgtgaatagacgactctgtaccattcttcccataggtttgcttaggagcgagggcaggggagaaggagaggaggggccttgtatgagctctgagatcacttctaggttcctgggaaactgtcttagcctgtgccagagggaacaggggaacgtcccccagtgaattcgcagcctcatttctcagcaatgaggaaatcagccagagaggcctgacttggtggcaaagctgtagctattaatgggaagagccaattctaatgtataaacacccacatgtgcgcagtttgtgtgtgaggcacatgtgtgtgtgcatgtatacacatacacgtgcgcatgcctgtgtgtatgcgtagagtcagagggcaatcttggatcgtgttcctcacaagccaatcatagaggcatctgagacagcctgaagctcactaaataaactacacaggctggctgtaatgctccaggaatccgctcatctctgcctccccaactctctctctctctctctctctctccctctctctctctctctctcttctctcacacacacacacacacacacacacacacacacacacacacacacacacacacacacacacacacacacacacacacacacacagaggcctgcttgcatgccacatgcctgaccttttttttttttaggtgtggtgattataacaagtaaaactaaaataaccaaaacggaggcattcttgctgcctttgcagagtagctgagcccaggggggactcagaatgacgatgccctgtctgcccctgagcgcgggatctatactgtatggatggcaggtgtctccagagaggacggctcgagagcccagaagcaaagagcagcttcgtctggaaatggagcgcactcacactctcggagacagctgagaggaagagagccacagcatgctggtgtgtgcaaagacctacggtgtttgcaggcattgagcagtggcgcaccatcaccagatcagcctatttttttttaacctttagggcatcttgaatgtttttaaagtaataatactacctctaaagaaagaaaattatgcttaagccaaaatttgttattgtctgaaccagtgccattgacaagctaaattttccagatctcagtgtgggggtgatggtgcttccctcagggaaaaccagaagaagacaggggtgggccttccttgcagatcacaggcaggcttctcagcccgccctggctcccacagagaactttctatgggagaaaggaaggggagaagagggagaatagactgattcttctctcccccaagtagacagcttcgaatttaaaatacaatccgtgttaaatagttttgtcatgggagggaacaagtcataaggtgcaaccaaaagatgattgctcatccccgaggctagccagtgttgctctcccacctttgagcagtttggtgtgctgtccccaaagttacctagtttggaaaattatctttttaattatttgaaatgtaaccaagaacatctatattagcaatagaaaccattcctcccctgaatctgttgattttcctgtttctttaataaaaaaaaatactcttacaaaatcagtttgtgagtgaaggtgtttaatctgggtcacagttggagggtacaccggggttggggagggatgcaggcagccaggttgttacgccttcattcaggaaggaaacagagaggatgctgctcctcggctcacgtctccctttttcctcagcccaggacccaggtccagagaatgatgccaccgacagccaggatggatcttcccatctcaattaacctaatctagttcatctctcaaggcatgcctagtggtgccttctaggtcttctagatctttccaggccattctagatcaggttgacaatatcaatcaccacatcccttattcctatatatcgtgaatgtgtttttatagtattaggaagaccagatgccaagttattagcctttctagacttctggtagaccttcatctgcctcttcttgcttgacacggccatgggaagctcagaacagcacccctctgtggcttttcacagtgaatgtgctgctcaatcataatcccaaattctgttcaaagtgagttctttgatgatgattaaatgaaaatctgaatgtcaaacctttgctagtcgttcctccaagataacaaacacttatccaaaatatgtcctttagatcagtgccatccgaggagatttgtctctagtccgtgaaatatttgttactcatgccacacaggaagtattgaaattgaaagtggtaaagatacatttatagaaatttgagagaaactatatttgaacaaagtcggggctcctttaccaaatgccggtatcctagctccttaggggagaggcgttctcattacctttgcagagtggctgagccctgtggggactcagaaggactcatgccctgtctgccccctgtgtgtgatctgtactatatggatagcagtttgtatcacagttagcataacccacttgtgaaggaaatgaaaacaagcccttaagcaacaggaggaggccacaatagcatctcaagcgcacactcaaactggacctcctgagtttgctgactgcttctcttcctgaggttctcagccccatcttcttgacgactcaggataagcttaagagttattgctcataatttacattatgagcatcctacagtggtctcaaactccaaatcttttagcttcccatttctcaggactgcaggtgtgtggtcccatggagaaggggcgggctcagtggccccgtccaactggggagctctggttccttgatggttgtggagggaaagtatgtttctttgtgtgcatggccactgtaggctgtctatgctccagtgcatggccccacacctatagatagcactaattaggctctgtgagttataaagataaaaaggaagagaacatgaaatggtaggggcagggtggggggttaaggaggaaatggagggatggatatgatgcaaatatattgtatacatagaatattgtcaaaaaataaataaaaatatacaaaacactgtatttcaatcacatataataatcactattttgcagtcattttgtaataataattaaaagaagggatcaatgggagataaattttcaatagttgtaaaataaacacaccagtagactgtgtagttgtagaagataaatatttatattttttacatccttgttctaaaagacatttcattgttgttgtctttgtttattgttttttttaagaaaacaaaaccaaacacgaacccaagaccatacaaagtcaagattgtcattttcttctactctacttgaaaaccttgtcctactagagggtttgcaagggtgatgcccttgcacagagctgctgtctcctgtggtattgatgctctctttgtaaacccttccaaaaggggtcctcccaagtctacgttacagttacctcttcttcacaaatataatacacttgaaaatacagcaatagcacaagaaatgctatcatttgtcactctcagatattctattagctgctttcctgttgctgtgaaaaagacaccatgaccgaggagacttgtagaagaatttactttttcttacggccccagagggctagattccataatggctgggtggaggcagcagttagacatggtagctgcggtaggcatgtagccgagaactcacgtctgaactgcgaatgtgaagcagaaggagcagactggaagtggttaaagctttaactcttaaagctccgccccccaaccccagccccccaccccccaccccggggcacactttcttcagcaaggctaaatcacaaatctcactagacagtgcttgctaccagctggggtccgagtgttcaaacacaggagcttctgtggacgttctcataagccgtgtattgttatgtgtactacccatgagtgtgatgatgtatcggtaacacagctaaggtgttcgtacctgggtcaatcattccaaagacgcatgcgtaagaactgtttctggtcctgctccagtgtctaggtgcagccttttgtatgttgtgcaactgttttgctcgtttgtattcggtttgacaaatgctctagttttttgttttttgttttttttttttttttggttttcgagacaaggtttctctgtagccctggctgtcctggaactcactctgtacaccaggctggcctcgaactcagaaatccgcctgcctctgcctcccaagtgctgggattaaaggcgtgcaccaccacgcccggcttctagttttgttcttatagaaattgtcctgttactcaaggttctttgcattaccgcgtgagttctaagaacggagtgttggaattcccactcagattggatcccacctataaatgaactgagccaaaaccgacatcataacgataccgaaccttaacaattcatgaacatggccgatttttccattccctttgattgtccaaggctgaacacccctaagcacataaaacatgagcgcttcccatgtgtcctgttaatcaatggccaccgtccctttcattagggagattaggcacgaaaggaggtggcgagcgggagagagtaatgattcttacaaataagttagtaagccacatagaagaatttgggccctcactggactgactctaaaacctgtttcttgttccctagtagacagctcagttgcactagggctcagggaaagccatcacttatttctgcaaacctctctgaaactcagattgcttctgaacaattgtacattttgaatacttgctacaaggataacttcagctgtagtaagaagacagtgttaatctgtgcagggacagaggggcatcagaggttaaattattcttccaaattgcactcgagaatacagtgtgctaattatatcctctgagtatctagcttgtctatacatcacacttgggattcaggctaatgaacagaataaactttttgcacaccattgcaaaacaaatctaaaaaaaaaaaaaaaccactgcacacataaaaagacacagaagaggacagttctatttataaattgcctgtgcgaactgatctaggagttgaaaaaaaaagtttgcaaaatggtctgtctgctctggatatagtttgtagactactccattagaaaattctacttattttacaataaaaaactatttatggtttttaggggaaagcttgcccactaccacaaattctgcactttcccacatttgagaaagtcacaagggtcagaatatctgaaatgcagtggatagacctcaccctgggaaaactaccatcttgattatgaatgctatcttcccttccaagtaagtattcacgtcccaagataataaaaataaaacaataaactaaaacaaatctcaggtgattgtaattaagattagccaaagtctttgctggtcctgatgtgtcgttgtcgagccaatattaaacgtttcaaaagaattcatgaagaaaaggtttcagtttaaagtctgctcccatgcacttgcatcgaggatttacttttactttgcgtgtgtaagtgttttgactttatgtttggatgtgcacctgagtgcctacctgatgtcttcagaggtcagactcaggcacctggtaccctggaactggagttacagaggttgtaagctactaccggattctaggaaccaaacttggatcctctgctggagcagcaagtactcctaatggctgagccgttcctctagccaggcacttaaaaatagcatgtgtgagtgtatgtcagttcgtgtgtgtcagttcgtgtgaggtgcacctatgtacggccatgctggtgcgcacacatgactgagagccacaggaggcttatggtgtgccatttggaagaattcagaaagacagcgcttctcattggcccagagctcaccaattagactaggaatgctggccaatgaactcagagatccctctgacctaccccagaacagagattgtgggtgccacatggacttcggggattgactcttcctccagggcacaaggcaagggcttttctgactaagcatccttgtagtcctgcctgacacatttagatttacattgcatcacaggactccccagggctctttctgtgcctgtgtccaggcagtccagggagagtcaacagcattcatttcccatcctttgactgatggttcaagactatggacggatgcctacgtttgctgagttcaccttgtctgcaaaggtcaacatggcaggcctgggagccaagtagacgctagtgggtgagcatcagcgtgtatctgacatcgagtttacagctccatgccatccgttggaatggtctctgagtggtccacctcacctgtcgttttccagcgcagagtaagccagtggggacgttcggtggaagcgcagggaatgggctgctgggggtgtgggagggaagacaaagccacagcaacactccttcagacggagtcccctccctacctgtctctgagaacggccgccccataaagggcgtggcagggaacccgagccttggggaggagggtcacgaggctggggccggaggaaggaggatggccagagcctgtaggacttggagcacagggtgggtgaccctgtgctgatgtgtcgtgtccttcagcggctaacaggacctgaagcctccccacaggtccccgctgtttccgccggtgccccctcggagtgacttgggccccaggtgagcctagccaggcgccgccccggggcatcaggtgtcctcggaaagtcgcctgttgcgctcgggaagggagccttgtgtctccagccgtggatggcacaaagagggagggtaggggaccaggacatctgagccatggagggcacacagaggggaacggagtgcgagatgcaccggtttggcacaatcggggctccgccacggacctcaggtcagtggggcgcctggtggggtgggaacactctgtgtcacctcggcaaggtttggaggtgaccgaaaagccctacctgtctgtgccagtttagtttcccagactgtgagaatccaatgccggatgccacccccagcccagaaacccccagcccagagcgtccgttatctctgggaagcctgtgatcctggaggctcactggactgcttcccactagcgtctgagataactctcaatggctctgtgtctgctctaaacttggactcaatttttattacaggccctcggccagaggtagaaatggggcagtagcctgggttctgtgcttgtcagactgactccagtagcagaccggacagaccttactttctggctaggagccagcaccatagaggtagtcccatggcatgggagaaaaagaggaaggaggcacgcattgcagagagatgagcactgttctcattctgtaggagcaaagccggaggttccatgtgggcctagtgggttgcccgaagttaaagacttatcaaattgtagaggaaactagggaggagagaaaggtatcgtctggtgaaatgggacaatgcggaagaggccggttgtggccgtttctctctccaattacacctcccctttctgcagctcaacccaatttagcttctggttgctttaagtaactgtgtctgactagggcctgcaccctgacccctgaggtagacttctgcagaactccttgacttcaaagagcagctgtcaatcaatacctggtcagttcagtgagggaggcaaatttcacagtcagccccggaatgagagccagccctctggaacaacctgagcagcgttttgaataaattaatggtcgttggctgttctctctttgtttctctaggttacggttacatagtgtctgtctatcttgtgtgcttaaagtttaattttcctctgtaatataatggaaagggggttgttgggatttcaagtagttcacaaacactttattcagacaaataaaacacacactatctcaacaaattcgatattgcagttattcatatgtagcaaccaacagaacttgttttttaaattggacatagtagggtttctattgctgtgataaaacacatgaccaaaagcaactgggcaagaaagtttatttcagcttgcgatgttcaggtcacagtccatcactaggaagtgggacaggggcacaggacaggcacctgacaagccaggctctgaagcagaagccacgaagaaacggtgcttgctggcttgccccttggggcttgctcagcttgctgtcttattctacttaagcccacctacccagggatggctccactacctacagtgggctgagccctcccacattaaccttaatcaagggaaggccctacacatttgcccacaggtcaaccttacagagatcttttctcagttaagagtccctcttccaagatgtgtctagtttgtgtcaagttgacaaaaaccaaaccagcacaaagtctcaaacatagcctcctcaaatactgtctctaatatcccactactttattttagttcgtgtgagacaagctctctgttcctcggtcatatacctagcctttcaggttctattcttgatagagataagacgttgaacaaaccccctgagaattaatggcttttccccctttcctttatgcctttcccttaaggagatttgagatgcacttcggaaccaggaccattaatgtccgccatgacagttttatttggaaggaacccagtgcattttttacatagtaacatgcgttgtgcattattttcttcactcagcagtggtcttattaatctttttattaatcaggaatttagaatgtctcccatggctgacttttatagcccaaatctacattgcaggaatgctgggtttgccgggaatgtggcaatctatatcaaatgtgtgattctggacttagaaagctgtagatacgatttctcagatgttgtataattgtaggctaaatttttctccctttgctgttgagtataattctttatgaaaacattaaactcaggagggctttcctgtgtgtgtggaaggactctattgtcttggtgagtgtggggtattttatttaaatgggtttccatattatcaatgctagcctaagggaaactcctggataactgccactctctggagagacttcttccttagtctgaaaaagcctactatttggtatacccctttcaaagaggtattccaaatagtagggacacgtgcctcaaagggtgaaatgagttagtaagtataaggaagttcaagtgggggggtcacttgggaactggactgcagttgagagcctgccctcgatgatgtagcagagtccagttctggaggctcgctcacactgcccctcgacgtaacagtggtatcagaaagcattcctgaccactgaagggagagggtgaggctgccagcttacactctacacaaaggccttatttgtatttggttgaatgtttcttacagtcttatgaggatagatattattaccattttgcaggactgaggctcgatgtaggctgagtgagatgattcaagtcatcgatgtatcaagatccaaactggttcttggttctgtataaaacctacttatggattaataagtacatggaagtttttgtttctcccatgagaaggagttgaatgaccatatccacataaaaatctgcatatcatttcagggtctgtttactctctgaagtcctttctcaacctctcaggcctccgatcttggccgtgactgtatctgttacccattgagctggaaagcacacatatattgtatacagctgtatgtgtaaacatgtcttttttttttttttttttttttttttttttactgattggagcagtccttggatttgttaactttcacctaggtgagaattcacttaagtagtcgaaacaagtgaggaactgaccctctgtcctagtctgtgcctacctagtatggtataggaatacaggacaccctatgtatggacactggagcagccatgcagggtttcttgggcatagtaactaacagcccataaagtagtttttatgtctagggagcacagctgggcctcggtcacctgcagcaatctaaggagcactcataatctttcagggacttccattccggtaaaaacgagatccgtagacttaaatacagaaaaagaattccgagactagtcaacatgaggtagaggttaggtttattaatgatgtttaaacacagtttctgagcatgagggttaaaagagaaagagaggggacccaggagaaagaataatacattctcatgtgtgggcatggacttctcaagagagggacctgagtacccgcctagtgccttagtattagcttcaggtaccagcttggtggatttcaagtcacattgcaaagcgctgctaagaaacttctttttctctcatctgataaggacgatgctagatggctccagagatatcttagatggaattataatctaattaagcaaaaccaacagccaccacgggttgcccaaggggttcgtaacacggccttttccgttaagaggatttcctagtcagacttctagaaaacagcaggttggaaagggagaaaggccttaagcaaaggttaattgtggctgaatatttaattctctgctggtgagaggcttgaaccgcagactctgccagcgcgaaacgaagagcgcatcacattcttttctcctgccccgcccccacccaccctcccattccccacctccccacttcctcctgtctttctgctctacctcgcggtctgtgaccctttgttcaggcttctgagcctctgcagtagcaaacaccgcgggcctgggcctctcccagctgagtggaagtgtttgcttccttccctagagatggcaaatcccgaggtgctggttagcagctgcagagctcgccaagatgaaagcccctgcactttccacccgagctcgtccccgtcagagcagcttctcttagaagaccagatgaggcggaaactcaagttcttttttatgaatccttgtgagaagttctgggctcggggtaggaagccatggaaacttgccatacagattctgaaaatcgcgatggtgactatccaggtaagcatcctcctgcaggagttaggcggagcctctttgcatagcagagaaggtggcactggttcctcaaacaacttttaactgcacctgtaaggacagacaataaataaagatttaaaaatttaaacccttctcccttcgactttgtttctttgtttgtcctctctttctttctcttgattcttttttttaaaagtttttttttttttggagacaggctcactatttaggcccaattggccctgaacttccatgtagaccagacaggccttgaattcacaagagacctccgtcttcccagtgttggtaaagtgtgtaccacgacacccagctctttctcatttttttttattatgataattttaatgccatagtatttttcaggaataaacatttttagcagttggatcctcatgaaggcctttcttgagagttatctacatctctcacagatatcatctgattcccaacatgagttctttcttttattcctaatatggtgggcatttctttctctagaaactgcatggtgttttgccacaggcaacttcttggattccttagactccatgattcctccagccccaatcctgaaaaccgtggtgcagaagattacggggttggcagcaggggccgtgcatcgcctgtggaatgtgcgccttcattttcgttagaaaggaaaatctcagtctgccttccataacttctttacatatttttgaggaatcatgtttttgtgagagttgcccacgctggtggtgtttattattaaaacatgtttggggctgacaaggtggctgtgctggtaaagggtgcttgccaccaagcctggcaacctgtgtgtgatttctagaacccacatggtagaaggtgtgagctgactcttgccaattgtcctctgacctctgtacacgtgtgtaatcgcaaagaaaaaaaaagggtaaaaaaaagtttctttttctgctggtgagaggaaatacctcttgtaaaaagcagaaaggaaaaaatgaagacaaggtttagatttgcatatttattttccattcttggtgaacacctgctattgaaagagagggtattttttgtttttgttttttaatattgagattgataatcttaattgcttactggaagcaagcacttaggactagcagaccaaggcagtttctagagtcatctgaagttggtagaattcttatctgaactggggtaacccctcatcccagtagagcagttcatgtcattgtgaccaccctcccactggggaaatcccagtctccgccttacagagtgggacacggatgcttacgggtttaaaaggctgcgtggctcatacatagtaacatggaagcaggcacagtttttctttaatatatcaccaagaaaacatgctcgattcccagtaaatacttggcaacccgcacttgaaatccttaatttccaggtgataatgcaatatgtcacagcactgaaaagcttatttgtgccatttcaatggcggagcctgtatcagctgggcaagaatgctatttacttagagtaatactagggcacacttgggcggtggctgtgtgccaagctcagcgctttatacatgtgttcatgctcacgtcttaactagacctgagcggtgcatctctgcctcgggcagtgaacaggcttagtgtgcatccctgtgggatacaggagaccagagcagagaaagtgatgcacacattcggagctgcacactctcaggctggtgtcctgaattactcctcgtcttttagaggaatcatctgatctcccaatagttactcgagtggtccaggggaaagttagtcggtttaagccttttggtaagaaacacacaaaggtgtttaagtaagtgtttaaaaagggacatatagtttgttttggagatgagatctcaatctattgccagggctagtttggaaatcactatgaaggttagactggctgccaattcagtgcagtcatactgccttagactcctaagtgctggaattacaggcaggacaggctggagccttcaccgcgcctctctccccctctccggctctcgctcgcgctcacctctcccccccccctctctgtacccctcctctcccccctcccccacccttgtgtgtaaaatacaacgggctacaacggccacactttaccatgggaaccccgcggtacacttgggcgatccgatgctacacctccatgacgcggcggtatatcgggcaccagcatgagagtgtgccgaactgactgtgtggatatataaaactgaactggaatggggtccgcgctcggattcgtactactggtctgccttggcaccacatccaataccatcttacctctccttccctacccctcttcccccaccctctactaataccatcccacattaccccgcttatcccacataccccgctcaccccgtagcccgaccccacgcgtaccccgcccgcaccctcgatcgacaggctgtagattggtcggcttccaggcgtcatattcagcgannnnnnnnnnnnnnnnnnnnnnnnnnnnnnnnnnnnnnnnnnnnnnnnnnnnnnnnnnnnnnnnnnnnnnnnnnnnnnnnnnnnnnnnnnnnnnnnnnnnnnnnnnnnnnnnnnnnnnnnnnnnnnnnnnnnnnnnnnnnnnnnnnnnnnnnnnnnnnnnnnnnnnnnnnnnnnnnnnnnnnnnnnnnnnnnnnnnnnnnnnnnnnnnnnnnnnnnnnnnncacacacacagtgtgtatctctgtgtgtccatctttgcgcacgcacgcgcgtgtgcacacacgtgagctcgtggacatacaaatgacatgcatgtggagatctgaggacagccaagtctcctttaccttctaacaggatctgccgttccccactgtgtacaccaggctacctagtgggcttctggatatcttctctcctgtgtccccatagtcatactggactgctggcttgtctgtggttctagggatttgaactcaggtcctcatacttgtaagaaaagtgctctcattcatggaatcatctcccggcccccaagtcgagagccttctgggtatcctgcccagtccctcacagatgcttgccagtcaggcctctatttcttttctcttcaaagtttttcatcctcacggtatttcttttcttctttaagctggttctgtttggactaagtaaccagatggtagtagctttcaaagaggagaacactatagccttcaaacacctcttcctaaagggctacatggatcgaatggacgacacctatgcagtgtacactcagagtgaagtgtatgaccagatcatctttgcagtgacccaggtaagtcaactgtgcttcacgtgttgattttgtctgtctgttttaggtatcaagggttaaactctgggccttacacgagctaggcaagtgttttaatagtgagatatccagacagtgtgtgcattcttgggagaaagaacaggctggagaaatggactatatagaaacccacactcaagcacgtgtgctcgtgagcatgcaaatgacatgcatgtcatttctgcttggagataacttatgaataaactatttaaatacagtttaagggctgaagggatggcttagcagttaagagcacttgttgctctttgagaggacttgagtttgcttctcagcatctttattgggcagctcagaactgcctataatctcagcttcaggggaatctattgtgtttttggccttggctggtatcccttcacacacacacacatacacacacacacacacacacacacacacacgtgtaaaataaaacagatatttaaaaattgatagaaaaatattgctatactcatatacaagtaaaaactgatttaaaaaaaggatatgattcctaccgacagaaaggtaggatttcaatgagtcatttaaaagaatcagggataggacttgatgtgagagcttcaatattcaaaattactaacaggatataggtagtcattaagtcttcaaagcttatacttttggagacgtataataactaacaagaatattaattttgcagtttgggtaacaagcaaggccttcaagctcatgtaaaagagaggcttttatgccaggcctggtgatggttgttctgtgatactgagtaactgactgcctggcagaaaataagcttgtttttcatcctccagactcaagttttcattctgggttattcttgctataattagtactttctcaaggtaccaaatcacttcttttgaagggataattaaaagtgcttttgagggcagtgtttttggcctaggttagcctcagaccacattccaaaatcattaaatcccttctttaaacacgtcccggagcagccatgactcctcatttctggaagcagcttattcaaacagaggccatgagccactagcatggagcaccagcagcggctcagatgaagctcatctttctggaggcaggactcctgctagccttgtggacaggaagcctagtgtgtgtatgtgtgtgagagtgtgtgtttatgtgtgtgtatgagtgtgtgtgagtatattttccacctgaggtcagagtcctctgtgtgtgtgtgtgtgtgtgtgtgtgtgtgtgtgtgtatgagtgtgtgtgagtatattttccacctgaggtcagagtcctctgtgtgtgtgtgtgtgtgtgtgtgtgtgtgtgtgtgtgtgtgtgagagagagagagagagagagagagagagagagagagagaatgtatgtgcatgagagaaatagagtatatgtcttaattaggattttattgctgtgaacagacaccatgaccaaggcaactctaacaaagacaatatttagttaaggctggcttacaggttcagaggtttagtccattatcatcaaggcaggagcatggcaatgtccaggcatggtgcaggaggaaatgagagttctacatcttcatttaggaaaagactggctcccaagtggttaggaggagggtcttaaaggcaatacccacagtgacacacttcctccagcaaggctacccctactctaacaggctaatggtgctgctccctggaccaagcacattcaaaccaccacagtatttatttgtgtgtgtgagagaatatgtgtacatatatgtgtgtgtgtgtgtgtgtgtgtgtatggtgtttgtgcaggacatgacatttgagtgaagcacagaggacaaccttagtttccagtcctcaacttctatcttgtctgaggtcagagtcgttttcatcattacatatactaagctaggtggcctgtgagcttctagagaatgctcctgtcactgagccctgtcttatcgcagggacactggaattacagaggcatgcgactgtgcctggtttcccatgggtgtaggggatttgaactcaggtccttatggtctggtggtaagtactttacacagtgagccatctctcagccctagatttaacttttaaatgtattaactatctgtaaaacgttgtactagatttgtttgtgtcctagagggtatgcagagacaagaactaaaccatccactactttttgttgttttgagttggggcctgatgtaacccaaagtgacttcaaactcttggaagcagaggctggctttgatctcttgatcctgctgcctccacttctgaaaagcaatccctatgcctgactaaaggccaggtaaattctttgtaaccctttcttagctttatcaggagggccacactcagccttcagaacactgtgtctggcactggaaccactctccttgctagatctccgtgtcctctccaccaggagtccttatcttagctgccacacttctttctgctactataggaaaatatctgtagtcgatatgtgaagccgtttcctcctcacagttctgagaggctaagatcaaggcgtctgcatgcttagctcttgtatctccctgctgtggcctccgtgatgaaagggatgcagatgggtgaaggatcccctagtccctccggccctgttatgtcagaactgtgtgggctaccagatcaaacatagcgtggtaatccctgcatctggctgttttttcttagtccccactcagtggcctcaacacctctgctttctaaagaatccacacacacacacacacacacacacacacacacacacacaaaaatcatagctcgtattacaaaatactgctcatgcgatagagagattcatggtctgttggtgtccatacatacatctaagagagacatgtgttctgtctgtattcacaaatgcatctacacctctctcagtgctcactgccaggcatttcctcggactcagcaactggcccttctgatctccatcactcttctttagagcctctccctccgatgcagcatccgagggtgtatttactgaatgtctgcaccccgaagggagacatggccagcaagggctatcatggctttgcttctgccctggctggcacccctttggccctggttggtgttccatttctgtctctcttttcctgtgaagtacttgcagcttcagaacatctccgtgggcaatcacgcttatgagaacaaggggactaagcagtcggcgatggcaatctgtcagcacttctacaggcaaggaaccatctgccccgggaacgacacctttgacatcgatccagaagttgaaacaggtgatgatcccctataacctccaactcctgtttttaaccccttgatttatacctaagccctgtgataccttcatctctgtaaacatcgatggacagtaccctcatggcataggaagaactatacaaaagttcttacgtgccaacttctatagtgaaccgtttgttataaaacttaggccagacagtggtgccgcatgcctttaatccctgcacttgggaggcagaggcaggcggatttctgagttcgaggccagcctggtctacagaatgagttccaggacagccaaggctacacagagaaaccctgtctcgaaaaaaaacctaaaaaaccaaaaacaaacaaacaaaaaaacctcatgaattcaaaaggaaaaacaaatagggaaagcatcagggaactagaggcagggagagcaatgatgttctgagacagagcttgagtctttctaaatcgtcaaccactccagaaatgtcctacatcttaaagacagtagacacaggacaagggcagcgatactgagttcttacagtcttgattctaaaaggaatcgatatgagcagctgatcttgaccgctgtcctctggaaatgcagtcatatctatggctttgtccctttctgtggcagaatgtttccttgtagagccagatgaagcttcccaccttggaacgcctggagaaaataaactcaacctgagcctggacttccacaggtgaggaaaatggaggggcacacagctcagctctgtgtgtgaccccctcatctcaagcatgctctggaggggcacacagctcagctctgtgtgtgaccccctcatctcaagcatgctctgctttccagacttctgacggtggagctccagtttaagctcaaagccatcaatctgcagacagttcgacaccaggagcttcctgactgttacgactttacgctgactgtaagtgtgggttgtgctccatgtggctcctacctagagaaaaattattttaaccaggtgtatggttcatttactggtgctaaggcattgtcaaaaatataggaagtgccactcgaatgtgccggggacattgctctgaccagctctagtctctgcatgttgctaacttgctgtttgtcttctggcccttggtgcatgttctgtaagtcagggactcgcctgcgtgttactgtctccagtgtggcacctgctgcacagcggatgaccaagtaccaaaggatcacgatcatgaagggcataacaaacacatatgtcttcaaatgtcgtaacttttgtccccctgtgatattcttctaaaaaccctacccagcatacttctgtcttggggagagccatcatctgctgaggcttattgaaatgtgactcatatatctgctgagtccctatctgtccttgaggctctttatgtggaaaaagaataatttctcattggtgaggacttttcactccaccaaatgacactggcatctcctcgtgtggggtgtgggctgtgttcttcagccactgtgggcagcatagccaatggcagtggcttcatttgtgtagggagaggggctgatactccatctcaagggcacgcagagtgactggactctttgaagttacttagaacctcatacttgaagctctgtctgccttctctgtgtggagaaacttcaacaaaacccaacggcagaggattttgagcacttttaaaagtccttcgagaatttcatagacaagtacaatgtattttgatcatattcaccagcactgccccccctccaaatcctcccagaacctgttgtacaatcttcccacttagtccagtcgtcgatgcctcagtacgcacaggtaggagttatctccagagcatggataacgtatcagaggccacatatcccaacaaaatgaatgactctctcccagtagccatcagatgccaacagctcctcagctaagggcgtggtctcatgtgtctatgatgtaaagtcagctgacttgattttgtgctgctgtgagttgatgaaaacagttgcctgttacgtcctccccacattccgtcttacagtctttctgccccatcccttctgtgatattccctgagcatgggatgggggtggggcacagtaaggtagatattcatttaggactaagctgtaaatgaaggactttcaagtgaaccttttccattttttgttgggaaaggggaagaaaaatatagatggattttcttgcctttccttctttctctctgcatggaggaagcaagagagttagatggagacacaggaggatcacgcaaagttttgtgctgtagctttgtgctgtttgtactgagcatcttcaactagttatctcagaagcaagaatgctagcaactctgtcaccaagccctttgtaatatgtgggatgtcagagtgatggagaaatataagcctagaatgaaaaaaaataaagcaaaacacctctccacttggagtgtctaaggacgatgtccctctgtgcttgtgtttctgtatttgcataatttgcctgaacaccaaaagctatctgttgctaaggtcggttgggaaggtgtacagaggaaacctgtacaaattcagcaagtcaagtgtctggaacagaagagagagcactcttgtttgctaaggtgtccagggctagaatgcatcctagaaacacgtggtttagatgctaaaatctctctactgcagatctaattcagtgttatcacctcacagagaaatgaaggggcacactcagggattagcagagaccggtaccagctggtcagaagcgaggatcagcatgtcctgtgtcctctgaagaactgcttcctggtggatttacagacctatcttgactctcaaacctagtcacgcatcctggaccccttttcctgtttttacagataacattcgacaacaaggctcacagtggaagaatcaaaataagcttagacaacgacatttctatcaaagaatgcaaagactggcatgtgtctggatcaagtaagttgtaagctctactcattctcaggatgctaattaagtcattaagcatcacattactacccgcaggatgtagggaccacgaagtaaaagactgggccagtcccaggcccttgaccttctgaaggcagattgggttgctgtagatgtctggtgattcagtcagtacataggagcatccaacatctccttaccttctctacagtccttactgactacatactcaccgttctgcactaaaagaacacgcatacctattttcctcactcaatatctttaaatatctcaatgggcagcagaatctgtacattcacagatgaagaaaccaagggtcaggagcgatgtgtcttacatcgagggagaagggaagacttgaccttgaagctatgacattgtagttatctttcatctggcttaaaaagcagagtgatgtgggaagaaaaacctgttctagaaacacaaacaaaagatcagattagaatgagtcctgtctggaacaggaaaacactgccaggaaagaatttccctgagctgttatctaggtaggtcctctgatgtagcccagatcgtaggttgtgctgcctttcggtcatgactagataacacaagagattaattacatgggctctacggagaacaagaggaagaatctttgatacctgctgagatgtgctttccacaagagagttggtagatctgagctgggtctggactgtgtgagtgtcagaccaacatgatggtagtcaccgatgtacagtttgtgtatgagtgtatggcgctctggaaccacaagcctcactactgtcatagacctacctgggtggaatacaaacttggagcagcatctcacatgggataaatgggagcatccaaagtgcctggcatagaggctgcctctcaaacgcttgcttttggtttttaagtctgtctaatgcagtgttagacatttgggcagccattagaagcctctgggcaaacatcagaagtatggtttattactgctctttctgaaattgcttcctcacagtagcctggtagagataaactcggaggactcggtggctgctgccctcttttgatggcacctgcttgtgggccacgatggcatttatgactctccaggatttcaatgtctgaaaaaaatggtcttctctcctcccccaactccccttcctcctccattctctctctcttcttttatttattttttctttcttttattcctctcacttcttttcttcctcctcctccattgcttagacagggtctcttatatagcctaggctatcctataactcatgatctttctgccttgttctccaagtgctgggactttaagtgtgggccaccaagcctggcagaaacggctcatttcttgcttcccaaggctcagttaaagccttgatgaggcctcttttctggctaccttctccagtgtggagcaatggctctgaaacatagccttgtacctggagggttcagggacattatgacttctgattcagcagttttatggcaagagctgaggatatcttctaacaaaactaaaaacaaacagaacaacctgatgcacagtggtggtgctgtgaacgtttaaacgccaaccgtgctgcttatttatcatgtggccttggcacatgatgggacctccttgtgcttcagttttctcaagttcaaagtgggctaagcatggcagtttcgtgggggctgttgtgaggatcctgtacacacaaagtgcgtggaatagagtcaggtgggaagtgtgctgagcaccatctgtgtttgtgacttaatgtctcttgtacccctccatctatgcctattgtccatgtacctgctcacttctttgcttgtctcacgtcacagatgctcctgttaggttcagggtcttgtctgttttgttttctactgtgttccaacacctggaaaagtgccaggtacatgaggatgctgaatgggtattttatacccagctaagtatcttatcaagcaatgtaggagttggaaggcttaattactgattgattgactttttttttttttttggagaggatttcactatgtgtagcccaggttgaccgaaaacttagtatataatccaagctagcctagacttcatggtattccttctgctgcttgcttccgactgctgggataataggtgtgcatatcacacccacaaggagaacctattcagtataaagactaaaggctgataatgaaagatctttgatttgtttttggttttcttggaaggaccttcagcttttaaaaaaatactaatggaaagagtgctcgcaggacttcctgtccttgtcattctgaaatgtttgaattatctgaattatttgagaaagaagtcacatcatcgtgttaatgtttccatggccctctgtcttccagttcagaagaacacacactacatgatgatctttgatgcctttgtcattctgacctgcttggcctcactggtgctgtgtgccaggtctgtgattaggggtcttcagcttcagcaggtaagtgctgctccccaagacaccgctgacgcgctcagccacactgaagctcacggtgtctctcctcttcccaataggagtttgtcaacttcttccttcttcactacaagaaggaagtttcggcctctgatcagatggagttcatcaacgggtggtacattatgatcatcattagtgacatattgacaatcgttggatcagttctgaaaatggaaatccaagccaaggtaatactgttcttcccaactgtgcagtcacaatggtaaaatgtatttttccaaactgtgaaaaaattcttctgggctttgtattcagttaacttgaaattgacaacagcagttttcttaactctagttaagtcttatatctagaagtctctctctctttctttctctctctctctctctctctccctctctctctctctctctctctctctctctctctctctctctctctctctctctgtgtgtgtgtatgtgtgtgtgtgtgtctttgagatagtgtctctgtggagccttgactgtctaggagctctttctcacagctctgcctgcctctgcctcctgggtggtaggattaaaggcatacaccaccaccactcagctactagaagtctctcaagcagagttttaaaaagcataatccacaaacggataggccagttaatctgagtggttagatcgagagagttcaaagtctccaggtcacatacaccaaaagtcatatacacaccagggaaattctgctaagagttgttaagaggtctcacagaaaatgttaaagttaagatattagaccaaaaaataagaggaggaggaggaggaggaggaggaagaagaagagaaggaagaggaggaggaagagaaggaggagggtgggaagaggggaatgaggtcaacttctgtttgagtttctaccttatttcctttgctctttcaatgtaaaaatatgctcatgttcttttcccattgatattattctcccaaaataagattaatctagtctagaattagtctttcttgccatacaaacaaaaattaacaatgttcaagtgaaccttgtcagcgttatactttgctagtcttgtcatccaggacctggtcgtaaaccgaggcagactccaaacacaggggctgggtcaaagggcaacttgcttctcatctctgaagcagccagggtggggctttaggttgcaggtcgttcagggacctaagctctctgcatttcgttccttgccagatgctaagggctcatcctgacttcacgattgacacagggttgcctcatgagctggctccagcctgtgggaagtgaaaataccagatggtggcagccttccggtgtcacgtggccatggctcaggagtagcagatttcattcctgttcacacgctctagagtgacattagtcaaacccacctgcacggggctgtggggaagaaggacacagatgcctgagaagaacaggggcaagaagaggcccaccatgggccagctgataccataacatggctgtattttcgtgtagtttagctttacggaaccaaaaaaaaataatcatggtggatttatagttaatatttatttattttattagttttaagggagtatcatatgcagaccaggttctcttcaaactcaccatgtagctgaggctggccttgaactctgatcttcctgcctccacctccccggttctggtgttaaagggatgctccgtgcatgacatcttttttctttttatcaactaccatttccttccttgagccttcatagtgtccagcatggtcttcatttttctggaccatcctcttcccttctgaaacctctggcacttcctcctgccctcacctcacttcctgtttcatagcagtaagagacaccccttccttgtctccagtgtctgtccattctgatactgtggatgatttaggctgctgtccaaggctagctccttcacttgcctctcaggagctggccccaggttctttcttctctctggcagctctttcctcctgtaactccctcatactatgtttttgcttcttctgcaaaattaaattcccagatcctttatccagctatttcccatgtctctgctccagtttataggataaaagatatcaaagtagtacctaaccttgctgattctaatcccactactaactgctcttccaggatgtcttccaatctggctgtgtcatgtagccatggaaattcctatctgctgtcggccgtggatcgctgctctctgtcctgacctgccggtagcttcccactgctggtttggttagcgtgtgttgcctttccgctgaggtgactcttaccaggttttctccagatcccggtctgtcagagttttcctagctgcttcccctccgggcggccagccctcagtgtgaggatgttttaaggcatcctgtttgagcagcccttttctgtcactgccttggtattgtcgtcctgacccagatagatattttggtaccactgtaccaacatgtgtcaaatctgcaccttaaagtctctatgttgcagcctgcatagccaagtgtcaaccttccatcttgaccgtctgcttatcttctcagatttaagtatccaactcagaactccccccagcgctcctcagtccagatcctttctcacactgcctttccagcccttgaacggcacctctcagtgtgttcattacctcaaacctcgcgttcactgacgctcccctcctttagaaaactcctctctcctatgcctaatcttagcgggaatttatgtgttctgcctctgagaaggagccggtcacctttacaggctgcacccagtcgtcacctgctctcacattactccaagccctctgctggcagtctgttcgccatgcacccgaaactcccatgcctctcctcttctaggctctcaaatctccctgaccctttttgacaaaaacaaccttagatgtctgtgtgttgcagcctgagtgcccgtgagggcttacactacccccccccttacctccctccactctatctgcttctcacttcttgtcaggctccctgctgcctccggttctttgtatttgctgctctacgagcccaaggctcttcgaggttttgggttaactttctccctcatttctttgcttccatgtcacttgttcattgaggttgttactgctcatcctgttccatgctgcaagctcacacccattccttacctctccccacacccgtggtcatcttcctcagcattcaccatcactgaatctactggaggctgtgttaatctattgctgggttttgttccgtatattccactagagtgtaagctttatgaaggttaaaacaaacaaacaaacaaacaaacaaacaaacaaccccaaactatctgttgctttattcttcacatctagaacagctcctggcacatagctatttaatatttcttgcctaactgacatattgcaatttaaccagttttccctattctatctagagtctcacaagctatgatgtctgcagcatacttctcgggacgtcaactatgctcgtgtggcttggagttatccgatacctgggtttctttgcgaagtacaatgtaaggaatcctacagagtccacttgagctacttcactactttgactaaagggtggagggatctaacaccctctcttacttccgcagctccttattctgaccctccaggcagcgctgcccaacgtcatgaggttctgttgctgcgctgctatgatctatctaggctattgcttttgcggatggattgtgctgggcccttaccatgagaaggtaccgtattagttaagtttctgtttctgtgaagagacaccataactatggcaactcttatgaaggaaaacattgaactggggctggctcacagtttcagaggtttggtccattattgtcatggcaagaagcctgtcagtgtacaggcggacatggtgctggagaagaagctgagagttctatatctggatccacgggcagcaagaattgtgtaccactgagcctgggcttgagcttctgagacatcaaagtctgtcctgacagtgacacacttccaccaacaaggacatacctactctaacagggtcacacccccaatagtgccactccctatgggccaaccattcaaacacatgcgttaatgaggctgtttctattcaaaccaccataggtactgataatagccagctctcttcccgacattgttaagctcatatgacaaggccaatggcttctatttttatgactactattgtttattcatttctatttttgtttgtgttcaggttggccttgaactcatgtatgtagtcaaggatggccttgaagtcctggtccctcctgcctctaccacccaagtgctgggatggcaggtgtgtactaacacacctaatatgctgttttacccttttttaaatatgaatacttttatttattctttgagaaatttacacatgcacatattttgatcatattcatctattattcctcccaatgccttccagatcccccctacattccccctaacttaatgttctcttttttataacccattgggtgtaattaatgctgcccatatccacatgggctgggggccgtccattggcgtgtgatcaccttagcaagaacacactgactacccccaaccagcagccatcaaacgctgacagtgttgatctttcttacatggactcctttgatctggtaattcagcctgaaaatatggacagtcgtgtatctatatccacatatagatccaataacgagtgtatcaatttataaatcagtcaaatgtgaacacctcatgagaattattgatctgctccgttgcctgacctcctgtttggaatacgttagataagtatgttcctttttaccaccagtgaagttgttcagtctgtttgaattcactcaaacacatctgtaaaactgtacaaaaaaacctgtaggaatatttgaaaagtttgctgtgagaactctcttgactgttagatgttatcatgagttggatgagcttcaaggtgagatgagggaccattcgagtctggaacctgggtgtctctgcagaagcattcatttcaagggtctctttctgcaaaagggaaagggtgggaagggcaggaaggaaagggaagtggagggaagggaaaggaaggggaagggagggaaggtgagggaaagggagcggaggggagagagggagaaggaggaaagggaaaggaagggaagggaagggaagggaagggaagggaagggaagggaaggaagaggagagatgggtggggaggggatgctcgactctgagaggcactgagagagcagaaccgtccttcctgctctagtttaggttgctgcagctcagaggagtgacaagaaagagctacctggcgaagcagcaggccggggcatggcatatgccccaaagcaaaggctggtggcttccttgggttggttgttgggaaaggagcacctggcataccaggtcaggatgctgtcatgaacaaaaatctcccacatgaaggaacatagaggaaaatgaactcttttcacgccttccccagttccgttccctgaacagggtctccgagtgcctgttctcgctgataaacggagacgatatgttttccacatttgcgaaaatgcagcagaagagttacctggtgtggctgttcagccgagtctacctgtactcgttcatcagcctcttcatttacatgattctgagccttttcatcgcgctcatcacagacacatacgaaacaattaaggtaggcttgtcagaagccggaggctctgcctatctagaaccgtgtgtggcggcacagcttggtactcagaggacactgatggggtagagacacacaactaaattataataatcacggaaaagaaaagagtgaaggagaatggaatttctagaatgatgagcgtcttgtttctcagtatttgtgttaagaaaataaaaaaagttcttttttattcattgctagttgtgctaaggatcaaacccagggcctggcacgtgtgaggcaatccctgagcctttgaactttatgtcttcgactgttaagtacattttctaatctcttattagactaatacatgtcagtaggtattgcatgtataaagtagatgacatatgagagaggcaatgttctgtgagagtacctgtaggagatgagggatgctcgctgggagcacctgtgggagatgagggatgctcactgcttggatcccagccaaactctgctaatctaaattggattggattctagctgcctgaaccaggtttcacccaaggaacttccttcacattggctgggaattcatggggttataggcagcctaggagtagacatcataggatttaagctgcatcttggccacgtgtttcccaagtgagggttacggacaggattcacatgactatgggtacaggcagactgggaggagtgagcacaggactactgcagagtctcaggaccatttaacttccatttagcctgggtggctccagaagtgacaggtcctaaaatgcctgggagcgcccagctctccctggagacaccccttccactgccagagctcctctctgagtctggaaggctactggagaggccctagtaatgaagactttcctattcttctgtgtagcactaccagcaagatggcttcccagagacggaacttcgaaagtttatagcggaatgcaaagacctccccaactccggaaaatacagattagaagatgaccctccgggttctttactctgctgctgcaaaaagtaactgttgggcttctctgtgcttgggaggaaaatacagtgtgtggctgagccagagattatttgtgatcacgcaacagtatatgtccagatactagtattctgagttaacaaacagctatgacttagcaggacctgttcatagtttttgaaactatttaatatcttttctgcttacattagcatttttaaaatgactgatttgatgagggaagctaatgggtcttagtcgctgtaggtcttgggtatgttctctttaccacacagcaagccttgtgcctgcactggaaataagctttcgcttctcagaaactttggatgacccagttcccctctctgagagttgggataattattacacatcagacaccatggagtctctccttaaatgaagacagaacaatagagagccccatcacagctgtgtgtgggatgcttggctctgaaggacagtctttgattctcctattcatttagaagctttctgcccttcagtgttaaggtacaagattggaagagagtctatacacggatgaagtccaaatgcacaccaaggaggcatttgattaaacagtgatggctttattagcatccaagcagcattgggggaattggtgatacaatgtgtgttccatgggcctgtgcagtctcaggaaacccatttggggtcaggatttgtggctctgtggtttgaagttctagaacccatgttcaaaattttaaaatgaatatatgtagcttgaaaaggcacagaattaggctctacattttgtagttctctaatgggaaattatggggatttttttgtggtataacatttattttgtgtactatttatccatgtggcatcaattcaattatgtataataatgactttacaagggctcctttaaaaacacaataaaaattttaactctttagtgttgcattagggacataataaagatacctgcttattttgtaatttattaggatacaacataaattttaaaactgtgttgattatctgagaagtccttaatgttattctttttgcgatgttttaagactaataattgtatttcattggaaacacaaaaccactgatccagggctgggcctggagttgcttccctgtgcatgcagagaagagaaagctagctatagactaacaggattggagagctctgggtttaatggagagaacctgcctcaataaattaagtggagagcaattgtggaagactcttgacatcaactgctggcctctacacatgtgtgcacatgcatacacacatgtacacatgccagatatatatctcagaaactgaaaaaaaaatgttaggagaagttaaaagttctgtggagtcaatactaggacatccagggatacacaaagtgactctgttgccaagcaaacagactaaaggaaaagaagcagggtagtgcataaaggctgatctatggggtggggtggactataaggttagatgtgtctgttagaagagaggaaatgtctaaatttcattatccaaatatcttctgggaaattagagaagcatgagaacatggaaaactctggtaagaaaaaaaccaaatcagagagtcaaacaagaaagagtaagtcaatagaaagtcaaccaactcccaaatatagttttgttttaaagatcagtaaagtaaataagccactaactaaggaaagcaatgcagacacaggtattcagaattgacggaaggatctcaatggattccatgcatcgaacactcaagtacccttcagtttgacaaactgcacagctcgacaaactacacagcatggatcaattcttccatgttttgggtgggttccctaaaagttctcctgttagagactgaattcgtcagtgttaccacagttgggtgctggacgtctcatgagaggtgttggggtcacaggcgttgagcccccaggaacagactgatttttctcatggcatgggtgagtgtcctgatttctctcacgagcccccaccagaagctaataataatttatccgaggcaaaacaaatgcttctcctttatgagttactcagcctcaggcattctgtcatagcaactggaaatgagggaagaacaagtagtagactgttgctatggcaacacttgactatgttgaaaccgcagtccaacccactgtaggcccagactgcatcggttttgaagcaagtgttgggaaaggagctggttgtgagagttactcagggtaattctgctgagagctcaggaaaacacggagctaaggacggtatgggagcaaaatggttgaggctgtcacaccaacagaactgtgggaaatgaaggccgaggtgagaaggttgtgtgtagaaatgagaatgtcttccagggaaacagagtgaaagtcgtcctattacatcgatacaagcacagaggccatgtaagctctttctgtctgtaactgaaattagaccaatgtatgccgcagagctcctcagatactcccagtcactcttaaccacttggggaatgtaacagagaagggagagctaaccctggaagtcacaggtaagaaggaaacatggcactgaaaatgggagaattagtagccttttttaactcatggaagagttaaaaaagcatggtcaacagatatcaccaagtatatggctaagctgatgcttgtaaggcaggtctcactcaccagaacaatggagaaaggccccgatgctatttcagaaatcttagagtctgtctgcctctctcatcaaagtccagaatcctagagagggaggaggggctccaggactggctggggtatcttttggggccttatcactctggtggcccaaggattctgctccctgcatcccactgtgggctctgctcagcctcaaccagctgtgcctcgggtgtatccaggtgtgcctctgttccaatccaaagcatccaatcagtaagcctgggctgcatgctgggtcttaagtgggtccagccaccgccggtcactgctgtatctgccgcagcaaacggcacattagacaaatgctggcactgcccactcggcaggtgagtggaatgcaggggctatgaaggtgtggagccccccacttaaacttcagaaggactatctgggagctgcatggggacctgccagcacaggagatggcaaaccctgcaacaggtccttgtctgggagttgggctgggggctgcagttgtgattcctaccatgacaagctacttacagtgctgtgaagacaactctgctccacagagagcagccatgttaattgagccccaacaaactgtgtgagtggagctgcctggagtcttgggggcccactctctaccctgtacttggagtgaaagatgattctcgaggtttaagatgtcatgtctaatctgttgggtgcccgttcatcatcttattctgtggtccactcttctcattgggaacgagagtgtcttctctaaggctgtcctgctttttcctcccagaggcgatgacttctcttgattttacagcttcatgtttgacaggcatttgtcttgatgtcttgtctcagatgacacaagggactttgaagctgattctggagccagttgagacttggaggttattgggacaaatatattccataacgagaagtccatgactggggaagggtataggggagaggctgtttgagtgtgtctccccaagatccatgtgctgggagccttggcctgtgagcgacgtttgggccctggggatggagggaggctttgtgagtggataaatgtcccctgttccttttcctttgtgtatgtcccccctttcccttctgttttctcacatgctaaagtgttcacttaaagccaaacagatgctggtagcagtcgtctggactttcaaaacctgagccaaatgtaattctttcctttatgaattacccagtgataggcattcctgttagagcaacagaagatgaacatacaagacatacaaagaataaattcacacaagggattttagttagtttgacatttcttttctttctttctttctttctttctttctttctttctttctttctctttctttttttttttttgcttgcttgcttccttccttctcttgcttcttatcttctttccttttcttcctttctttcctttttttttcttttttcttttttttttttgagagagagtttagctatataggcctgttgcctggaacttgatctgtgactagcctggcctcaaactcacagagctctgcctgcctctgcctagcaaatgctgggttaaaggtctgtgtcagcacagctacaaaaggatttgagagtttgagtaaggccatatttattacgtagattgaatcagcaacaatcttttaaaaaaagaagtgtgtgctctgcaaaaggcgccaacaggagaataagacaagtaggagaaaatacttggaaaaaaaacaagctaatgaaagcaaatataatatacacataactcaaaattcaacagtaaggaaacaaactgctcttttaaagtggatacagtaactggagaaagtgccttactaaggatgacatacaaatggcaatgatatgaggcagatgctcaacatcacatgtcaccagggaactgcaaatgaaatcaactcctgcacaccactgtcacagtcagatttcaaaacaccgaaaatcccaaatggtggtgagggcatgaagtgaaatgatcttgtttattactgaggagaattcaaaacggactgtaggtggtgccttacaagctatatttgcatatattagtagttagtcctagcgcttctcagcacttatccaaaggatttggacacatgcccacattaaacgacaaacaaaaatagtggtcacacagatgcttaaaggagccctcttcaaaatttacaagtgcaagcaaccaaggtgctcttggagtgagtggatcaatgcctgtggtatgtccattcaagaggacattatcagcgctaaaaggtagtgagttagcaggttatgaagggacatggaagaagcttaattgggtaccgtgaagcaaaagaagtcactgtgaagatgctacacacggtagcatttcaactgtatggtgttctggaaaaggtaaaagcagagacaaaagaaaaacctgcaattcctaaaggctacagtaggtggggaggtcgtggaaggcacacagagggctatcaggccgaatgttcagtcagttccagctgctataacacagtagtaatgattcagtattttaaaccaagcagtaaatggttatttttcacagttctgggagatagaaggttctcaaagttgaggcactggcagtgaagctgccaggtgccaagtgagagcgtgcgttccgttttgcagttcagcgggtgcagttcagacgggtgaccctgatgtggaggaggtggagaacgtgcgggaatcctccgcgctttctgatcaatttcactgtgaacctgtgtctgctctaagaaacaaaatctattttaagaacttaaaataacaacatttccataagccgagaaacagaaccactcccatttccctcttgtctgtacctgttttcacatcacacatcagttgtaacagaggcagtgccatctatcaagcctaaagcaacagagcgatccacaaagcctaaagcactgcccttctcctaacacaaagatcaccaagcccagagttaaaggctacttttgctgagctggattgctttctgcagaaaagctgagtcatccttccctcctaccatgagtgaagttgaagcacagcagaatttgatacagcagataaaaccgagctgctgtgaaggagacagaacacccgtggctttcaagagaaaacttctttccagagatcagagatgctcaggtcacggagattggtattgggttgattttccaccatcaaagggaagacgtagaccaaggaagacttagttcagagattacagtgtttaaaaacaacaaaagattaatatatagaaagttcaaagcttacttatttcatatcatcaaaaaatcagaaggacatgaagccacacaaataaaaagctcatttccctgttattttactgtgttctgtctacacagtgacttcccaatagagactactctggactgcctattataaaattgttgcaggtctactactatcttggcttacattttccagatgacttaaaagaaaaaaaaatcccctttaacatggtaaattcatgaaactgtcgtaagaaggaaacctgcaagagaaatccatgactgtgattggcaaacctgaaatgtctgatgcacagtacagggttgaacaaaacactcttgtgtcgttggaaagctaagacacaagccttgaagcacacacaggtgggtagagcaaaagcttgtgattgaaacacccaacacacagaacaaagcaatgtctagtgctacccagtgacacatgaacctggatcctcactggaaacaagagactctagtgaactaacctctgagtgttttaacagggtgccaggaaaccgtaattcatgtctcccggtgtgcgcgatagcccaaactttcagccgtctgattccaacgattgtccatcttttttttttcctcacctcttctctatccacagctccttcctacatttaggtggtcgttttggggccctttctactttaagggcagcatatgtggcgcctgcgtgagaagcgttttcctgggggatgggggatggggacggaaggaggcgcactgtactgcctggtctcagcgaggcagcttgggagccagtgggtgcccatgaggattgatacccaagaccctcctttaggaagcttctcctctatgctactctctgagaatttacagggctggagagatggttaagtcctgttcccatcgtccacattagaaggactcaagactccctgcaactcttgatccaggggatccaacatcccctcctggtccatccagacacctgcactcaggtatacattctcacacatagacacaccggcattatacatgtaactaaaaataaaataaagcccccttaaaaaaaagattttgctttctggttatatatctacatttacttttattaaaatttgagactgtgtggtgttgtgcaggtcagactggcctgtacttacgttgtgatccaagctcttctccaactcactgcgatccccctgactcagcctccaaaatgccaggaccatagtgcaccacacccaagcttattttaaatagatctcaaatatacttatttgagatacaagtttcattagtaacagctatttagataaatgtatctttaaattttatttagagtttttaattaaaatataataacattacttttccctttcttgttgcttctccaacccctcctgtgtctctctcactccctctcaagtaggtgaccttttgattattatatatcttgttgagtacactttagtatggcttttgtatataggatttcagggctgaccacttgacattggatattggatacatctgcactgactgctcaggggatgccttggaagaggggacagaatgctaaacatcagttatgagacccccatctcctagaaatgacagggacctcatacctagataaatgtatcttttacaactacctaggaaaagacatattttctccaccggtgagactgtttctagattgtcacaggtgggaatctgtttagagaaacatttgccaatgaagaaagttactggacaccagcaactgtttaatgacctgtcttgtcagtgggtagatatagtaagaagaaaggttttggagtgtcagagacctaaatagaaagagttcgtctgctagtggctgtttatgtgacttgggagtagtaacaaatgtctgtgaacacatacactctctctctctctctctctctctctctctctctctctctctctctcgtgtgtgtgtgtgtgtgtgtgtgtgtgtgtgtgtgtgtgtgtaccccacacataggtatcactcatgacttgcagagaccagaggacttgctggaatggattctctctgtccaccccatgattctggggtcaaacccaggactggctacactggggggagggggcagtgtacagaatcctgagcatgaaggtacggtgggcactgtgacttttcagacagactttctcagactttccatacccagtaagcgtatttcctaaaagaaatttggaaaaacaaaaacaaacaaaactcaagcatttttacccagtagtttttggaaagtgactttttaaaacagagtagatttggaagggtgggggtggggcagaatattcctcaacaccaacagcccttgtgaggtgcagacaggaggaccaggttcaaggccagcgtcagcttcatagcaagttggaggccagtctcagttatatgaggttgtctcaaaaagcaaaaaacaaaacaaaacaaaaaacaaaaaccttacacaaagggtccaaaaggctctgtccagctctttctacataatcctctacaaactgtcctttgccctagctaaacatggggacctttcgaacacttcctaacgcacatagcctggaaacttaggggtttagttagctccactgcatggtgacgacaggagcctctgagccggttctgtccaaaaggccctgctagcttcaggttgggtactgtagccaggttcatagaaaccaattgtcttgaagcccctgctttcaggcaacaagggggaagggcatagaggccgctggggtgggctactctgggctactcaggggtcaagcagactggctgcagaaagctgacttggtggctgaggctggggtcttgctttccacatgcttgccctgtcatcctaactacttgttagggagttatcagaataaagactccttagtgaagaaacccatccccacgaacttattgattccaagagggaggagcatccggtagaactcagtaccaacactttacttgtccaaaatcccagcgttggtagcacgtgcttgttgtaatcttagtactcaggaggctgaggccggaggattgctctggttgccagtgtgggccacatggtgagctcaaaagaaatgcaatgaacttttgaaggagtcagaggtctgggggcgggggtggggtggtggggtggggaatggggcgggagggaggaggtcaggacggccaggggggcggggtgggacggacgggcggcctcatagcaggctttccggacgacttccctttataagggcgtccactccacctgcatctcgcagacacccgtaggcggagccgggtgtggggaccgtggggactgagggaatttggggtcacgtcatgcccggagacgaggagacgctggacctgcctgcgtggaaccgcgtcccggacctgacttggggtccccaccacaggtgggtactcccccagtggaccatgtctggtggtcgtctggattccagcgtcccctcctggaatatctcccgccgagaaggtgtccctgagctcacacgtggaccccattctgcctcgcgtccgggctctccgctacgtagcaaaagtccttcgtgacagcgccctgggtcgcccagcgctgaaggaagtcagcggccgagggtggggacgcggggggcgtggcgggaggacagggccacgcgtagcgaccagggtgcacacagccgcttttccgcaaagtcccggggctgagatcagagcgctgactggaagggtaagaggctttggtcccctaaggctttcatttgggggccactgaacctctgggcggggaatgggtctagctccttcagtcccgggagccctggaaagttctgaaggaggatggctggccctgaaactgacggttttcccaggcaagagacccggagagacagagagggatcagatgttttatgacttttgttttttggtgtgtatgtgtgtgtgtgtgtgtgtgtgtgtgtgtgtgtttctttcctggtgacaggactctgaaaagatcctggtttgctctaccttagagttcttgctaccccgggcaaactaatgctaactgcttgcactcggttaaaaatgaggctgattgtttgccttccggaacaaaccgactttttcttaggtgggagggttgcggtgtggtcaaccctggtttccccagctctatgaaaaggcgttcagtgaagccaggtggctctgccaagcggcctctcctgagtttgaatgtctgcagcagcgcaattgagccggggaggtgaggacaaagtggcctttggctcctgcttgctgctcttaaaacaaatagtggcgggctgttaaagttttctaagggagcagggagcggcctctccttcctagcaggatgttcttgaagccagcaaggaaactgagccatagggaagttagtctatgatggctacctgaatggatgcttttctgcaagggtggcatagacttctcagaccttcaaaagaccggttttgaactataaaaccatgttggtggggctacagaggtgtgttcttttcttttgtttttgtttttttcgagacagggtttctctgtgtagccctggctgtcctggaactcactctgtagaccaggctggcctcgaactcagaaatccccctgtctctgcctcccaagtgctgggattaaaggcgcccggccagaggtgttttcttgcaaactcaaagaacactgttggagccaggtgacagtacttgggacctgtaatcccagtgcacaacaggcaggagacaggaggaccccccccccccaaagttcactagccagccagtcagccctaatttcagagctccaggccagtgagagacactgtctcacaggaggtctgtgttgttcctgaagatgacacccacagttgtccccacatgcacaacacgtgtgcatgcatgtgcacgtacacgaatacacgcgcatccacgaaaagaaaacattggagcaactttgagaacggtgaccagttgtgaacgacccatcaaaatgcctgctgtcatgaaacgtgcaaactatgtctctgaaattagagaaggctttttaaaataggccacatggcacctactcttctgtttttccctgaatgtacgtcctaaacactaaggagcagacaactctggtttatgtgcccgctgtcttttggcttggagaaggctgtattcatggtaggcgagatacataaccttaagagttattt

SEQ ID NO: 1669 - DNA, 2966 bp, Mus musculus
atgtgtcgtgtccttcagcggctaacaggacctgaagcctccccacaggtccccgctgtttccgccggtgccccctcggagtgacttgggccccagagatggcaaatcccgaggtgctggttagcagctgcagagctcgccaagatgaaagcccctgcactttccacccgagctcgtccccgtcagagcagcttctcttagaagaccagatgaggcggaaactcaagttcttttttatgaatccttgtgagaagttctgggctcggggtaggaagccatggaaacttgccatacagattctgaaaatcgcgatggtgactatccagctggttctgtttggactaagtaaccagatggtagtagctttcaaagaggagaacactatagccttcaaacacctcttcctaaagggctacatggatcgaatggacgacacctatgcagtgtacactcagagtgaagtgtatgaccagatcatctttgcagtgacccagtacttgcagcttcagaacatctccgtgggcaatcacgcttatgagaacaaggggactaagcagtcggcgatggcaatctgtcagcacttctacaggcaaggaaccatctgccccgggaacgacacctttgacatcgatccagaagttgaaacagaatgtttccttgtagagccagatgaagcttcccaccttggaacgcctggagaaaataaactcaacctgagcctggacttccacagacttctgacggtggagctccagtttaagctcaaagccatcaatctgcagacagttcgacaccaggagcttcctgactgttacgactttacgctgactataacattcgacaacaaggctcacagtggaagaatcaaaataagcttagacaacgacatttctatcaaagaatgcaaagactggcatgtgtctggatcaattcagaagaacacacactacatgatgatctttgatgcctttgtcattctgacctgcttggcctcactggtgctgtgtgccaggtctgtgattaggggtcttcagcttcagcaggagtttgtcaacttcttccttcttcactacaagaaggaagtttcggcctctgatcagatggagttcatcaacgggtggtacattatgatcatcattagtgacatattgacaatcgttggatcagttctgaaaatggaaatccaagccaagagtctcacaagctatgatgtctgcagcatacttctcgggacgtcaactatgctcgtgtggcttggagttatccgatacctgggtttctttgcgaagtacaatctccttattctgaccctccaggcagcgctgcccaacgtcatgaggttctgttgctgcgctgctatgatctatctaggctattgcttttgcggatggattgtgctgggcccttaccatgagaagttccgttccctgaacagggtctccgagtgcctgttctcgctgataaacggagacgatatgttttccacatttgcgaaaatgcagcagaagagttacctggtgtggctgttcagccgagtctacctgtactcgttcatcagcctcttcatttacatgattctgagccttttcatcgcgctcatcacagacacatacgaaacaattaagcactaccagcaagatggcttcccagagacggaacttcgaaagtttatagcggaatgcaaagacctccccaactccggaaaatacagattagaagatgaccctccgggttctttactctgctgctgcaaaaagtaactgttgggcttctctgtgcttgggaggaaaatacagtgtgtggctgagccagagattatttgtgatcacgcaacagtatatgtccagatactagtattctgagttaacaaacagctatgacttagcaggacctgttcatagtttttgaaactatttaatatcttttctgcttacattagcatttttaaaatgactgatttgatgagggaagctaatgggtcttagtcgctgtaggtcttgggtatgttctctttaccacacagcaagccttgtgcctgcactggaaataagctttcgcttctcagaaactttggatgacccagttcccctctctgagagttgggataattattacacatcagacaccatggagtctctccttaaatgaagacagaacaatagagagccccatcacagctgtgtgtgggatgcttggctctgaaggacagtctttgattctcctattcatttagaagctttctgcccttcagtgttaaggtacaagattggaagagagtctatacacggatgaagtccaaatgcacaccaaggaggcatttgattaaacagtgatggctttattagcatccaagcagcattgggggaattggtgatacaatgtgtgttccatgggcctgtgcagtctcaggaaacccatttggggtcaggatttgtggctctgtggtttgaagttctagaacccatgttcaaaattttaaaatgaatatatgtagcttgaaaaggcacagaattaggctctacattttgtagttctctaatgggaaattatggggatttttttgtggtataacatttattttgtgtactatttatccatgtggcatcaattcaattatgtataataatgactttacaagggctcctttaaaaacacaataaaaattttaactctttagtgttgcattagggacataataaagatacctgcttattttgtaatttattaggatacaacataaattttaaaactgtgttgattatctgagaagtccttaatgttattctttttgcgatgttttaagactaataattgtatttcattggaaacacaaaaccactgatccagggctgggcctggagttgcttccctgtgcatgcagagaagagaaagctagctatagactaacaggattggagagctctgggtttaatggagagaacctgcctcaataaattaagtggaga

SEQ ID NO: 1670 - protein, 570 aa, Mus musculus
SLPTGPRCFRRCPLGVTWAPEMANPEVLVSSCRARQDESPCTFHPSSSPSEQLLLEDQMRRKLKFFFMNPCEKFWRRKPWKLAIQILKIAMVTIQLVLFGLSNQMVVAFKEENTIAFKHLFLKGYMDRMDDTYAVYTQSEVYDQIIFAVTQYLQLQNISVGNHAYENKGTKQSAMAICQHFYRQGTICPGNDTFDIDPEVETECFLVEPDEASHLGTPGENKLNLSLDFHRLLTVELQFKLKAINLQTVRHQELPDCYDFTLTITFDNKAHSGRIKISLDNDISIKECKDWHVSGSIQKNTHYMMIFDAFVILTCLASLVLCARSVIRGLQLQQEFVNFFLLHYKKEVSASDQMEFINGWYIMIIISDILTIVGSVLKMEIQAKSLTSYDVCSILLGTSTMLVWLGVIRYLGFFAKYNLLILTLQAALPNVMRFCCCAAMIYLGYCFCGWIVLGPYHEKFRSLNRVSECLFSLINGDDMFSTFAKMQQKSYLVWLFSRVYKFISLFIYMILSLFIALITDTYETIKHYQQDGFPETELRKFIAECKDLPNSGKYRLEDDPPGSLLCCCKK

SEQ ID NO: 1671 - DNA, 49536 bp, Homo sapiens
atctgaagagtactcagcttcagaaaggagaaaaagagacaaaaaagcctgaccctgggacaaagatttagctgttggaagaaagggccaattttggcaattctagaaaaaaaaatggactagaacatcaatgagaaattaggatctatacaacattaaagtcaggagaaaggcattcttaactgcacagaatagcttgagtctactggggactaaggaggacacaggccccatgtggctccagaattgctggcccttcccataagagaaggcagggctctagcactcatctgcagtcttcaggcagtagatatctccagaagggccaaagcaagagctgtggaggtaaaaacagggccatgtggtagcagagtggacttacttgtcagtatggctgagacttaactctctacacccagaaatagttggtggtgggagagtcattgtatggtagtgacagtcctacaatatcataaagcattaaaagccagtgaatatcagttctacatgtataatttttattgtcattagagcacttaaatattttttaaagtgaagtcactcaaatattgtatttaaagtaaggaaattatgttgaagcctaaatttgtcactttctgcataggtggcattagacaagttattaaactctctaaatctcatctgcaaaatttgggatgataatgctttcatcagagccaggccagataaagggcaagagcaaccacattgaacaactaagggtgagggcaaccaatgctgccctaaggggcattcttcaaaagataccaaacttccctgtagtgaattgtgaataggttgtcagttagtttgggtttccatagggaaatttttacatgccaggagagacataaatgtattcttctctcaaccaaatagcttcagatatgaaataaaatctatgttgaaaaattttgccatgtaaaagtaccaatcatgagggtcaaccaaaaggcaatactcccattcctgagttcagcctgcgttgatacctacattttgatttaattttttcaagatggagtcttgctttgtcacccaggctggagagcagtggcatgatcttggctcactgcaacctcagcctcccaagttcaagcgattcttgtgcctcagcctcctgagtagctgggattataggtgtgtgccaccacgtccagctaatttttttgtatttttagtagagatggggtttcaccattttggccagcctggtcttgaactcctgacctcaagtgatctgcctggcttggcttcccaaagtgatgggattatgggcatgagccactgtgcccggcctgatacttatattttgaatagttcagcactctccccaaaagttgtctagtttggaaaagtgtgtttttaataagttgtttcaaatgtaaagaaagaatatatatgtttattaacaaaaatcagtttttccctatttccactagaaaaacagtgaacacatttttaaggggtattagtatgaacagataccaaattactagcctgtccagattgcccacagattttaatctgtcccttcctcatagcattgccatgaaaaaccagatagtgcttcaaatgtggcatattctcaatgaatagctgtggaaccagaattaatcaaaattctgttcaaaatgaatgtatagacattacttctgtcctttggtgactattaaaagtagatttgagtatccaactgtctacgagacatttccacttggatgtttaatacatagttatctaaagcctggcctttccttcaatgccagccaggaaatatttgctactagaccactagtttatgaaataattgttacccagctgcaataaaagtagtactgaaattgggtgtttaaaaactttttagcaaattgacacagtaactttatgttatgtatgaacaaaattgaggttcgtattacaaacgtccttatttcattcttttagcaatttatttatgttgtaattttacagaattattagtctgtgaaagaaatgaaaacaaaaccaagtcaactaaccctttaacagatagtctgagaagcactttacagacatctcaaaaacacactaaaaactgaactgctggttctccccagatacctgctcctcctgccatctttttcatcttagctgatggcaatttcatcttcagggtcactttgcacaaacttaagagtcatacttcacacctcttcttccatccttcatacttttaggatatattttcaacattgcagtcagagggatgcacttttaaaacaagtcatatcatgtcagtcttctgctcaataccctccaacagctccaatttcattccatttaaaagccaaggtcctcacaatggccaaggtccagcataacctggttcctgttacaagcttcatttcctaccattactccctgcagctcacaccactgcagacacactggtgtccttgaggttactcaaacacactaggtaggcatctcctcttttgcattggctgttccctctgcctggagaacttaaacaagatatccttcaagtttttgctaagatgttaacttctcagtgaggcctactctccactctttttaaaatgccaacttctcagccttcctcattctcctttctccgttttatttttactcataatatttatcaccttctaacacactatgtacttatgtttgactgtttttgtccactaaaatgtgaactctacaagggcagggatttttgccgtgcttactcctcctgtcccagtgtctaagtctatgttggcatatagaaggtatgccacaaatgttcattaaaggatttggaacaaccaccttggagagtaatttggcagtatatattaactaaaaatgaatacctcctataatctagcaattctacttctggatatttaccctagagaaaattttacacacgtgcataaggaaatgattcatggatgttcactgctgaattttttttgttttttgtaatggcaaaagatggcagaaacctaaatgtccatcagcagtaaaatgcatagaatgatatggtataatcaataaaatggcatacagctgctaaaataaacttggatggatatagcttaagacaaactggtaaggtaagtgataaagattaggtacagagcaatgctatctttgtaaacaaaaacatgcatgaatgattcctatatataatgggaacatatattcaagaaaagtattacaaatggactgaaatgattcacaccaattcatgatagaaggttgcacttgcggagggttggtgtattagtccattctcacactgctacaaagatactacctgagactgggtaatttataaacaaagtaagtttaattgactcacagtttcacatagctggggaggcctcaggaaacttataatcatggcagaagaagcaggcatcttcttcacaaggcggcaggagagtgtgagtgtgtgaaggaggaactgtcaaaaacttataaaaacatcagatctcctgagaactcactcactatcatgagaacagcctgggggaaaccgcccacatggtccaatcacctcccacagggtctctccgttgacatgtggggattatggggattacaattcaagatgagatctgggtggagacacagccaaaccgtatcagttggttaactttataatgctttattcctcataaattaggaaggccaaaaacaaaagaaaatataaaatttgttcaatttggggggttgtgggtattgaatggcattaatgtattgttatttttgtacttttctgtatttgaaattttctcaaaattaaaaaatcatcttctagactgtaagatccttaagaacagcaactatattttattaatattttcattggcagtatctaataccattactgaaaaataggagtcctcaataaatactcgctaaatatgtatgtgttaaataaataaaaattttgttgagagaaaaagaagaaattaaggggagaaagatgaatggtacggatgtaagaagacagaaacgtaaaaagtattttgggtttacaaatgtgtgatttaatacccaggctacctgacattttcagctgagctgttattctaaaacagataggaattttgaatgcgaagataaggagtgaaaaaagctccctttcacccagcagatatgaagaatgtcatagagatctattggcttgagattcaggagcaaaaaattggaattcttgaaatcataagttattttgtagttttcataacactttacatgttttaaaaacataatgagtaaccataacaataaactgaatcttttctgtgctaggattatactaaaagtttcagaggtttattttggtttaaaaaagataataaaagcatgattattattatcagccaacatactgaagaacagtatatatttgattatatatgataatgatcactacctgtcatagatatttcatagtaaaaatcattaaaggaaggaagcatcaatgcaaaataaattctaaataaaaaattctaaattttaattaaaaaataattcttcaagtgacaatttaaaacacataaaacaatttccttatctgatagatttcatctttgctttgtgacagatattccagatgagagaaaatttctctcattttgcacttcatgtcagttcacttgttaaacgtgcttccaaagtattatcagattggacgttggggtatctgttgctttatataagctcgtttacttttttaacaaaaaaaatattttgttttacaaagaactaaacccttcagtgaatattcaaactatggaaaatgcagaaaacaagattgggtattcaaatacagttatgcatagcttaatgatggggatatgtcgtaacaagtgcattgttaggtaattttgtcgttgtatgaacatcatagagtgtacttacacaaacgtagatgggatagctttctatacaccgaggctatatagcgtagcctattattcccaggctacaaacctgtacagcatgctaccttactgaatactgtaggcatctggaacacagtgtttagtatttgtgtatgtaaacatatctaaatatagaaaaggtacagtcaaaatatgatataaaagattaaaaatgggggccgggcgcggtggctcacgcctgtaatcccagcactttgggaggctgagacgggtggatcacaaggtcaggagatcaagaccatcctggctaacacggtgaaaccccgtctctactaaaaatacaaaaaattagccaggcgtggtggcaggtggctgtaatcccagctacttgggaggctgaggcaggagaatggcgtgaacctgggaggcggagcttgcagagctgagatcgtgccactgcactccagcgtgggcaacagagcgagactctgtctcaaaaaaaaaaaaaaaaagattaaaaatggtacacctgtataggagacttaccatgaatgaagcttgcaggagtggaagttgctctgggtgagtcagtaggtaagcagtgagtgaacgtgaaggcctaggtcattactgtacactaccataaattataaacatgtacacttagactacactaaatttattttaaacatttttcttcctttaataataaattaatgttagcttactgtaagttttttactttataaactttttatttttgagacagggtcttgctctgtcgcccaggctagagtgcagtggcacaatcatggctcactgcagcctcgacctcctggacacagtgattctcccacctcagcctccagagtagctgggactacaggcacatgccatcatccttggatatttttaaaaatttttgtagagatggggtctcccaatgttgctcaggctggtctcgatctcctggactcaagcaggcctcccaccttggcctctcaagtgctgggataaacagggataagccacctctcctggcctaaaattttaaattatttattcatttatttatttttcattgcacaatggaaatggtatgaacttttatttattttatttttattttatttttgtttgagacggagtctccctctgtcacccaggttggagtacagtggtgcaatcttggctcactgcaacctccgcctcctgggttcaagtgattctcctgcctcagcctccagagtagctggaactacaggcacccaccaccaagcccggctaatttttgtatttttagtagagacagggtttcgccatattggccaggctggtcttgaactcctgaccttgtgatccacccaccttggcctcccaaagtgctgggattacaggcgtgagccaccgtgcctggccaaacttttaaaatgagtaaactttcttttgtaataacacagcttaaaacacaaacatattgtacagctatacaaaaatattttatttatatccttattctacaagcttctttctatttttcaatgttttaaaacttttttttgttaaaaactaagacaaaaacacagacattagcataggcttacacaaggtcaggattaacaatatcactgtcttctacctccacatcttatctcactggaagatgtccaggggtaataacaggcatggaagtgtcatctcctatgataacacaatcttcttctggaaatcatcctgaggctatttgacagctggcttttttttttcaagcagaagtatactctaaaataatgataatagtatagtaaatatgtaagccaatcacatggttgcttattatcattgtcaagtattatgtactgcacataactgtatgttctacacttttatagactggcagtgcagtagtagtttatttacaccagcatccccacaaataggtggataacgcattgctctacaacgttattgcggtgacattattacatcactaggtgataggagtttttcaactctgttataatcttatgagaagtgttgtatacgtagtcagtcgtccaccaaaatgtgttataatagtaagataccatttggatattctagcaacaacaaaagcattacatagaaacatatgttgaggccaggtggggtggctcatgcctataatcccagcacttcgggaggccgacgtgggtggatcacctaaggtcaggagttcaagaccagcctggccaacatggtgaaactgcatctctactaaaaatacaaaaattaggtgggcatggtggcatgtgcctgtaatcccagctactcgggaggctgaggcaggagaatcacttgagcccgggacgcagaggttgcagtgagctgagatcgagcaactgtactccagcctgggcaatagagctagaccctgtttcaaaaaacaaaaacaaaaacaaatgtattctatgactataaatgtattgatgtttatttacaagaatgactcactgacaagtccagaaacacaaacttataacattgtaaaagttaaaagcaagattgactgataagatctttaccgcttctcttttatgcactcctctcttgctttccaggaatgtttatgtaaacctttgatgtcagcgtttcctgtctttcttttgatttggtttcaatatattcctttaagccagtaacatcattatgttgattgttaaggtttaatattcccctttacattgttttaacatctttgtcagaaatcaattgaccatatatgtgtgaatctatttctggattctattttgttccattgcctatgtgtagtctatatgtctgtcttcaccagtaccaagttgtttagcttaaatagctttatagatataggtaggataaatcctccagttttatctttcttttaaaaaattgctttggttattctggattctttgcatttgcttccataggaattttagaatcaggttgtcaatttctacaaaacagtttgctagaattttcattgagattgggttgaatctataaatgaacttggtgaaaactgacatcttaataatactgagtcttgtaatttatgaacatggttgatattttcattaagttttccaaataaaagggggaatcagcatttataagcacatcacatatgcctcatatagtaatgggtgctttacatgtatcatattaattaaaaatcaccattccttttattagctagattgtgttagggacaagctaccccaaaaaagcttcttggtactgccaacacccccgccccccacccccgcaaacctctccgtaccacccctcctcttcccccaaacctttttacatttctaagcccctatctaggcaccgcggtgaagccaggagacttttacctatcaggtcttgctgctataaagcaaacccaattacaaaccatccggactgcacagtgggaggtcgtgggaagtataaacaaactttacctacaccctccggtaccataaacgtcacaaggtgatatgtggcagagttaaccaacaaacaactccagggtctctctcccccacataaaaccctcattttgtaagctcagggctgcctcctctgtctgtaatggagcagccggcaggttgaataaaggcttgcctgaacttgggtctcggtctctctcggtctctctctccctctctctctctctctctcgtcctttctctcggctaacttcacagattgcacataaaaaagaaaaggggttcagagaaggtaagtaactccctagagaccaataagtggcacagaagggaatttgggccctcatctgtctgactccaaaacctggctttatctattcaccggtccttataactcagctaaaacgagggttaagcaagtgccatcatttatgactgtgaacctcttcaaagttcagattgttcctgaacaatcaagcatttcaaactcttaccatcaagtaaggagatagcgttacatcgtgtgtaggcatatggggattaaagattacattatattttccaaattgcacttgagaattgactgtgccaattatatcctttctgggtatctaccttgttcacagtatgtgggatccaggttgaggaacagcataaaattcttgtaccctgttgcaaaaatttattagtaatccatgcatactggtttaggatttgaaaacaggttttataaaaggtttgctaggtatcgatctaatttcaggaataccctagtagggaaattcagtgacctttacaaatttacccgtggccaaaaaaaaaaaaataagtaaaaattaaaaatcagaacacatccaaagtaattataattaaaattaaccaaagttcctgatccaatcctgataaggggtattaggtttaatatttacagataatttatgaagaaaaagattacggttcaaagtctacttcaggtatttctatttacatttcttggaaaagtttcccagggctctttctgccccagccgccaatctacagaagagtctagtcgactgtccactcatttcacagcacttgtctgaaactagaagacccagggagggaacaaggttcaggcttgaaacgctaagacattcaagatttcaccttgtatgcaaaaatcagaatgggaggctgcagcggggcctcacactcaccggagctaggcgctatagatcccgcacccgcggagcccggcaaccacctgaggggccttggccaggagggggtggccccccggcgccggcggcagctccggagcaaacctggcaaacccgagcagggcggtgcgggttgctcagggagaaaatgaagggagtgatagggtgggggtggcagggaacgggcacaacgccggcttcctccggacggcctcctgcgtcccacctgtgctcctgaaaagcggcccccgacagggcgcggcgggaacccgagccgggagtagggtcacgagttaaagcggcgggggcgggaggatgcgcgggcggcggacggggcgctctcctcccgtctgactctgggcggagcggggctcgaggctgctggagtcgctcgctgactcgccctgcgccctcgccgcggacaccggagctgcggccgctccccgctgtcccccaggtgagcccgcggggcgctgccccggggcgtcgggtgtcgcgggaacggcgcccgcggcgcacagggagggccggggaggccgggaggcagcgagctgtcggggacgccgcgggaaggccgggccgggcagtcggcgccatggagggcaggcgggctggagctgggcgcgagatgcagctgttccgcgccgcccccaagccgcccgcaggtcagtggaggagcgcgcctgccgggcctgcccggggctgggcgggtgggggtgctctgctcctcggtccccctccaagccgccgcccacctgtggccagggctcagagggctggaagccacccccgcccggagcccctgggctggaaggcttggatgccggccggggctccagatggccttgacgcggctcggctggcccctttcaaggcggactgtccccctgttagaggtgggggcggctggaagtgggggctcaggcccgggtcgctgcgctggctgaaagcagccgccagccgggctgcggccgtctgagctccacggcagtgcccggggatggcagcgaccgctctgggacatcgctgcaaccctgcagatctttctcgcacacactacccaacaaaagtgtcaacccttgttgtttgtttgtttgaaaaaaaaagaagactggagagactaaagttttgtgtctggtgaagtgggaaagcgcttctgaaaaaacgaggttgcataactttgtcgccaactgggaggcctttgctatttatacactcccgggctttctccaattttctacagcttactccaatcaagcctctgcccgccaggaacaggtaacctgtgtgtgtccgtttgctccttctaagagcatgcctgatagatacttcggtagcctctccggatggccccttcgtcgggtagcctctcctgatggggtccttcgcccaccctgcctcccgcgccggcgctccgggtgaatgtcaagggtggctggctgcgaatacctccttcagctgctggggttcccgacagtttgcagtttttaaaagtgcaccctcggaagggcttttcagactgggtaaacctgacttttccaaggtcagcatctggtcctggtgaatgaaatgtctaccgggacaactcgttgtgatgtgctgaatatatgctggttggcttgttttctctttgttcctgtggattactgtacatggtgtgtggctagtttgtttaaaatttaattttccctgtatcaaagtggaaagcgcttagtgtcaatatacaactcaccaacatgcttattaacagcttcatcattatgttggtgttcatatgcgagctttggtcaacatgaaatcatctgcgttttaagtcctatagataaagtctccttaaatgctggttaaaatatcctgcctttttgaaggaagtaaaactgttaagtgaaaatcctaatttattaataactttttctttcctttatgcctttacctaagaattactgcatttatgctttgacaggcattttaacacgcacacaggagccacactttaatgagttatataataattatttcattttgaaggtactgcatttgccatacagtaaatatgttttatggtttattcatccagcagtatccttattaatcttttcattaacaagagtttaagaaccttccccatgctattctttatagccagtatctattgttcggagatgttgggcttcctaagaatgcttgaattggaatcaaaagtggggttctagacttggaaagcagcatggtatctaaccagtgacttgtaagatattgtatgaatgcaggttacaattttccttcttcattgctgagtacaagttattattaaaatgtcaaataaagcctgcctttctattccgtatggaaggacgctactcattgtttggggtattttactttgaacaggtttccatagtataatatcaatcttagtctgagggaaaatccaagatccatcccagtctctagagtgacttctccgtcactttgaaaaaactgattctgaagacaataaaaccagcccgacccaacccttttcaaacgtacctgcccccccccaaatagatatgaagtactttgaaaatatgctataaatataaggccttcaataaaaagtcattacaagcgatgccacagactgggaattaggcttaaattgagggcccattttcccctttgtacaacagttatgtttcctgaggctcatactgccccttaagaaccttactggctttctaggaagccaccctgtctgctgtgggtgttaggtaggtgagtctgcttagcgctagaccctatgcaaaggctttgtttactgttttatttaatgctctctacactcataactatttaattctggctacaatcatagaagggtaggtgtagttattcccattttgctggagaggaaactgaggctcagaagggctaagtgatttccctgagattgcagaaacgtcaagtcatggaaccaggattagaaaccaaactgaatcttgttctttacactacaccctgctatctttaactcggtggttttaaacattttttgataatctgtgaaagttttagttacctcccaggaaaaagtgtccacagccacatatatgaaagttttcatataacttcaaggcccacctaccctctgaagtccttcccccaggtcctcaggtctctgatcctctaactatactgagtgaggcagaaaacatatacatcctatatatatgtacatataatcttttactaatgggagcagcccttgaatttggtaactttgaactaggtgaaaattcactttgtaattaaaacaaataaaaaagtgacgtcctacattggaactgattctgtaaacatctaaaatgcagtttagagcaatggtgcttatttgaaaccaggacttctgtatgggcttctccttgcaatattaaagaatatggacttgtgtctttactcactaaatggaaatgttggttgttgttgttgttgtttttttcctctagagatggcagatcctgaggtagttgtgagtagctgcagctctcatgaagaggaaaatcgctgcaattttaaccagcaaacatctccatctgaggagcttctattagaagaccagatgaggcgaaaactcaaattttttttcatgaatccctgtgagaagttctgggctcgaggtagaaaaccatggaaacttgccatacaaattctaaaaattgcaatggtgactatccaggtaagcatctcagatcatgagtttggtgaaagcctcttttaattacaaagataactatggacagtggttttttttttaaataacttttaactatatgcaaaatgttgaagagtaacagataagaaaacatacaatcttagacccttctgtcttcaacatttgtgaaagagtttgtcttcttttttcttagtttttttcttgtatcgttcgctaagttataattttagtcacataatctaattaattttcaggaaaagaaaactaatatttggcttccaatgaagaggttcagctggtttctaaataagccatggaaactagtgttgtccaacattaggactttcttttccttcctagttagtttcctgggaatttctctcttcagaaacttaaagggttcctgctacaggcaaattcttagattctcacaaccctgtgatcatgagaaccatgcaatggaagaatgtgaagttaactaacagaagaggagtggcaggagctagtgaaacacaggacctctttttagttcaaagggagcttttaaatcacatttccttggctgcttttaatatttttttgggggaaagggggaaccatattttgtgattcttaatatatactggttgtgatttattcttatgaaaatatgttttcctgttggtcaaattatctcttgctaaaagcaaagggcaaaatagaagcagattttagtgagaaaaatagatgtgataggtttatttttattattacttactcttcctaagttggtgaaaaatgcctaagtaaataaacaattggtattgaaggagagattaaaaaaaacaggatattactaattttaactgcttattgagaacaaacacttatgattgttagggaaccaaggcaatttttacaatcatatgaagttggtagaattcttgcttgtttctaatgctaggtgttgtatcaagggaaacaaacatttagtgactaccctgttccagtacattatttcatttaattctaacattcttactggctcattttacagaagaggaaactgatgtttgtagagctcttttaaagtcacatggcttggccaggcagggtggctcatgcctgtaattccagcactttgggatgctgaggtgggtggattgcttgagctcaagagttccagaccagcctgggtaacatggtgaaaacctgtttctgtaaaacatacaaaaataagccaggtgtggtgatcacaccactgcactccagcctgggtgacagagcgacaccttgtctcaaaaaaaaaaaaaaagtcacatggctagtcagtggcaatatcaagactttgaaggcaggcattctctctattatattaccctgaaaatggatgttcagttctcagccaaatacttggcaagttgaaattgaaattcttaacttctgagtgataatatggtgtgtctcaatagtgaaaagtttagtttcttataaaggagaaaagcctgtatcaattgaacatgaatattttctacttagaataataataggtaccacttgagtgtttgctgtataccaggctaaacattttatagatgtcatcatgttcaattctttttttttttttgagatggagtcccactctgtcacccaggctagagtacagtggcgccatctcagctcactgcaacctccgcctcccgggttcaagcgattctcctgcctcagcctcctcagtagctgggattacaggcacacaccaccatgcccggctaatttttgtattttcagtggagatggggtttcaccatgttggccaggctgctcttgaacttctgacctcaggtgatccatccacctaggcctcccaaagtgctgggattacaggcgtgagctacagtgcccggcccatactcaattcttaaaacaagttggagggtaggtagtggtatcctcatttcacagaggagaacaatgagggtcttggtaaggaaaaggaccctgtcatagtcaggaaactagaagagtagaactgatattcaaactcagatttattttctctaagatttatgttcgtaattacttcttaatttttagggagctcatctaccttcctatgtttactaaggtggtcaagggaaaactgaacaatggtttaagatattaaggctgctagtaataagcatgtaaaaggtgtttaggtaagtttttaaaaggaactgagggtttcttaattgtgatgtttccttaatttatatcagagcaatcaaacaaatattagataaagacagctttgtaattgagcaaatgaagtgagcaaatggtgacagattatctcagggaaaatgaggtggtccttctgttaaactggagattttgtgtctgcagcagcaaaagaaagatgtttacaatgatagacaccctactaaaaatttctcttttcccactacctggcttactctctgaattacagcagttttctctcagccattgttattcctgtctgccactaaacctttgagggcagggaccaattgtcttctcattgtatcctcagtccctagctcactgctgacacaggagaggtactcatgtatttgaatgactggtaagaatatctttgggaattctttggggctgtttggtcatcagcttcaacagatgcaaaatccctagaatatcaagatgtcatcttattgaggacaattaaagaagctctgcagaaaagagagttaggtgcagagtgatgatatgtgtggggtgcagaccatatatcatatgtggaagggagaggggaaaagatttgtctgctgtattttttctgatcaaaccctggattactttgtgtagcatgacagggtggatagaacctagatttagtgtgtcagacatgggtttcagttttcactgtatcaacactggctagtgatgtgacttgaaaaaactatgtaacttctctgagcctcatctctaaaattggtgtattaggaatacaccgcaggattagtatgaggaaagttcctggaatagtgtatggcacataggtgctcaacattgttcccgccttccatataaaatatactctgcctcactctgggatttaagtaagggtgtagtttctcaatttacagcatgtacagcatgtggtgtgtgtgtgtgtgtgtgcctgtgtgtgctgtgtgtgcatttgtgtgtgtgagagagagagagaggtttggatgagagggaagagaagacaaaagagagacttaagagtatggtaagctttttttttttttttttttttgagacgtagtttcgctcttattgcccaggctggagtacaatggcacaatctcagctcatagcaacctctgcctcccgggttcaagcaattctcctgcctcagcctcctgagtagctgggattacaggcatgcgccaccatgcctggctaacttttttatttgtagtagagatggggtttcaccatgttggtcaggctggtctcaaactcctgacctaaggtaatccacctgccttggcctcccaaagtgctgggattacaggcgtgaaccaccacgcccggctgtatagtaagcttttaggtataattgaaaggccttaggttaatatgacaacagtgcagtgaaaccttttgtgtgtgtcaacaactgagtttcacgtaaaatgctgaggtcaatcctgcgtgactattaaggacacattatgttaatatactttaatttaaacatgagttgaaagggtattttctatttttggtcttactgtcatggttttggtgattagacctaggaatatagtttggtcataggacttggactttcttaatttattatccacctgctgcaaaaccttcttgatgtcccagagaattcattttaaactcttctatttgttgttcaagcccctgtaccttctgctctgctttttctgcccacattttccaccctcttaccttttcttttttttcttttaagctggtcttatttgggctaagtaaccagatggtggtagctttcaaggaagagaatactatagcattcaaacaccttttcctaaaaggatatatggaccgaatggatgacacatatgcagtgtacacacaaagtgacgtgtatgatcagttaatcttcgcagtaaaccaggtaaatcaagtgtgtgcattatttacttgggaaaaagaacagactggaaaaatggtggcaatgtacataatagaaactgacattcaagtggagaagggtgaacatttctgcttggaaatgacacatacaaaattatttttaattttttaaaaatattgtcaacaaatttttataaaaccagaagttgagaaaagcttttgtttagtaacagaaaggcagaaactttgaagatttaattaaaagaatcagagttagggcttggcatgggagtctcaaagattgaaattactaactatgaccctgggtataagtagtcattaagtcctcagagctgaaagtatactttcagggcctcttaacaaataatgagaatattaacttttcatagtttgtacagcaaccaagacctaaaaattcacttgaaagtaaggcctttatgtcatacatgacaatgattttattgtgacattgactaactgccaaacaaaaaacaagcttgtttttcatatagatgaatgctgtattttattctgagtttgtaatatatatttttgccagaaataatatatttttctcaagaccccaaatttttaaatctctaggtgtcattgaaagcgtccttgaagtcagcattcccagactgggttagtttgaaggacacatttcaaaattattacaatttttcttcagaaaattattatcgtataatcatggctattcattttctagagacagtctatgcacagtaagatgtaaactgctaggataaaatacatatttatggcatgaagtctttctgttagcactggggttgggaaaatgagccagaaatctaaagtaatagaaataagttacataaactgttcaacagaactatgtcctacagcttgtagggggaagaaggcataatgatggagatactccgtttttagaattttaagtatattacgtttctctaaagctagtctgatctaaactggtagtttggtgtttttcgaggggtggcggggagtgggatagaggcaagaggtaaacagttcattaaatttttttttttttgagacaggatctcactctgtcacccaggctgcagtgcagtggtgcagtcacagctctctgcagactcaacctcctgggcacaagtgatcttcccaccttagcctcccaagcagctggggccacaggcatgcaccaccatgcttggctaattaaaaaaaaattttttttatagagacagggtctccctatgttgcccaggttgctcaaactcctggcctcaagtgatcctcccatctcagcctcccaaagtgcattaaattccttataaatcatcttaacctttattcgtagacctagactcagtcttcaaaatgtagtatttggcacttaggccattctgctttttcagatttccacattccttctggaaatgcaggtacctgctttattctagttgtcttggtctgttccttctgctgcaacaaaatacctgagactagataacagacaaacaacagaaatttctgcctaataattccggagccggggaagtccaagatcacttaccttaccactggtaatggcttgcaccttcttgctgtattcttacatgatggaaggcagaaggacaaaatggcctggctaatttctcccagccttttataaggccagtagtcctattcatgattgttgacctcctaaagactccacctcttaagactatcatattggggtttaatttccaccataagaactttggagggacacatacattccatgtatgactccctactgttgattccctactgttttctaagatgatttactgtttttctaagcaccagtaggtacttttagctgaagataaaaagtgtcttgatcaaaatttttatgaataagtagggttttgagtgttaatgaggtctaatgaggtcagttctctttcaggcttctgagaaatgaatagaaaaaatgtgagttaatattttttattttttattttattttttatttttgagacagggtctcaccatgtcacccaggctgaagtgcagtggcgcaatcttggctcactgcaacctctgcctcctgcgctcaagcaattctcccatctcagcctcctgagtagctgggattacaggctcccgtcactacccccagctaatttttttttgtatttttagtagaagcagggtttcgccatattagccagactggtcttgaactcctgacctcaagtgatctgcccgccttggcctcccaaagtgctggaattacaggtgtgagccactgcacctggccaaaatgtaaattgttattaaaacaggaaggatctttgttttctgtgaagaaagcatttctttacttaatagttgaggtgattgttactgagaggaactgacaaatagggcagtggcatctcagttcttagaagcatatccatgactattagttatccccaagggtttagccccaagatgtcatcctactggataatctccagggctcattctgatccaatactgtgattataacagcactactgtttattatatatgtttctatatttgaatgtgagagaccttattttctttttaggctgtctcctggctttcctcttatttctttaataatttttgggtcagctttattggctccttttctttcatctgcctcttaaatttgagcagtcctcaaagcttggtcgttttcctacagaaatgtcctccactacccagcctcagccatcagtatgatgaagggactcctaagcagttgcccacactgccagacacctacctcacaagcacctcagaactgcccatccaagagcagcttcatattctcctcccacccactccctaggctgtttcttccttctggtcttctggcttaggttgaaaggcctcagggtcttccgggaatcatttattcttgcagctcaaacatagtttataaattcctgtttctggatggcttcctttctttcctacccaccctgccctaccacctcttgcttttggtgccacagcatttagctaaggacatttaatgtgtttttatattaccactcaaaggctgacctgggacccatgaatctgactgaaaactccttctctcaaggcagagctgcagagaccaggagggacggatgcccagactaattaaagctcctccaaggcctcagccacttggctgctctgtgccgtctcaccattgttagttccaccagttagttccaaccatcatctcataccacatttctgtcccgtaaccctctgtcttgggctctagagctgccctctagctggacacagccctgctgcttccctagattacccagttcttgccagatgctcagacctgcacaaagagccatatgaagagctcaaggaagtctggctatagcgtatatagttaatgtatatattatataacgtaactatgtggtgtatgtaggtataatgtgaacaggtacctgcagccgtgggtctcagatctttcacagttcaagaacttaaaaggtttaagacacaagattctgtggtcaggaggttcagacctttaggtgattcttgtggggactgccccacaattacacctggactctgggagagttgtaggccccatcacagctatgactgtgcgtcgtgacccctgcttgcctttcccagtttacctcccattacacatcatatgttctaggcacactggtctactgggtaccttaaatggaaaacaaaaatctcaaaactgagtatctccagcattattctactttatccctatatgccaagcataatgttgtttactagcttaggaagcttgcttctgttaccatagatttctggctcactttcccaatcctaatgctaacagaaagcttggtgccataatcacctatcttatcctaacagtttaccaactcactgtgcacagattagctctagtaatgaagagctccatcgcattattataatttttcacctcaccattaatctgacaaatatttgagcacctactgtgtgcctgcagggctggtgttagagcagtgaattgataaattccctgtcctgtggaacttgcattctaatgggggagatagattttaaacaagtttaactaaaatcttttggtttagggtaatgataagtgctatgaagaaaaataaactagcataaggcaataacagtagtctcggagtggtcagaaaatgcctttctgaagacttgaaatcttggggagaatatttcaagctgaaggcgtggcaacagaaggccctgaagctggaaagcgtttggtatgtttgagaaaatgcgagggaggcaagtatgagggggcagagttagggccaggggagctgggggccaggtctctcaggacatggaaaggagccttgaatgttattctgagagagacaggaagccatggaagggcttttgataggggagagacaatgataatatacataagcaaaatctaacatgtattcactcaaatatttattaaatagtatctattggttgggtacggtggctcatgcctgtaatcccagcactttgggaggttgaggtgggcagatcacgaggtcaggagatcgagaacttcctggctaacatggtgaaaccctgtctctacttctacaaaaaaattagccgggtgtggtagcatgagcctgtactcccagctactcaggaggctgaggcaggagaattgcttgaacccaggaggcagaggttgcagtgagccgagatcatgccactgcactccagcctgggtgacagagcgagactccctctcaaaaacaaaaacaaacaaaaatagtatctattatgtatcaggcactttttgtgtgtgcaagggtactgcagtgaacaaataaagtcaaggaggtcatattctcattggaagagccaggtagtaaataagtatagaagagcatcatctgtcagtttgttataagtactgtgaaatacaaaacaaagccagcaaagtgaatagctggaggtggttggagaaggtctctctgacaaggtgacatgtaagcagacagcagactaaagagagagcatgcagcctgtgtctatctcaaggaagaaccttccagataggaagaacagtaaaaacaagagtcttgagcaggtgtattttggatatcactgttctaagagctgtacatgcatgaattcattcactctttatagcaatcctatgagttctagatggagactagactaaggtgagagggaggattggagaggcagaggcttaattttttaggggagagaggatggtggtttggactgaggccatatcagtgaaggtgatgagagacagtcctatttgtggtgaagaggctcagatttttaagtgattcttttgcagagataatttgaaagtcatgcatgactttcagatggactggaagtggagtataagaggaattgacaaaaggatctttcctaagttttggcctgaacaactgactgacttacagaataatttattgagaagggaattactatggaagaagcaggtgtttctgtttgcccatttactagagattcctcttagacaccataggcatcatgtaggcagattgtcatccatgtgtggtattcagtggaaaggtcagagctggagatgcaaatttggaagctgtcagcatagaggtggtatttgaaatatgggactggttgaagtcagctgtggagagaatgtggatagaggtcaaggcctgaacccaaagataggccaaaatatagaggttggcagtgggaggatttcagcaaaggagaccaagaagaaacaatcagtgtcccagaagtcaagtaaagaaagtattccgtgtaggaggagcattcaactgcatcaaataccatggagatgtcaagttataggaggactgagaactaggcatcagatttggtaatacactgctcattagtgaccttgacaaggtccaactcaaaatccatcccatattagaaattattttattcatttgtcatagcatgcttcactcatatcttttagcagaattattttctatgtgtcgatcacacaaagttgttcatttcaagagtgacagaatgaccaactgtaccagacatattgctccaaaaacactttgttttggaaacatgtctgcagacatccattaagaatttaagatgacagttattccaaggcaccgtaagattcttacttgtaaaagtaatttttttaaatgtagaggacccactaggataggcaatattggtataaaggtgattaaattataatcttgcaaagataaaggttaaaccaatactttctttaaaaaaggttttgctggctagcctataataattgtatcccacttcttatactacagtgttaaagtagaactctgaccttacaggagatagtttaaagataaatatgtatttacattgaatatcacctgaattaaacataattctttaagggaggaaagaaatgcaaagagtatgtggcttcagactttaattttacagatcaggaactagaaggtcagaaagtttgtcacagaaatgaggcttgaatctagaactctaatttgtgagtgccctttgccttcctagtgcacagcagcaagtcacttaccctgtttatcaaagtgaatgtctctatcccaagggaacctgccaggatcagaggtggggagggaggggagttatggcttcactcctgccctggctggcattcccattttctgtttctcattttggttgaagtacttgcagctatacaatgtctccgttgggaatcatgcttatgagaacaaaggtaccaagcaatctgctatggcaatctgtcagcacttctacaagcgaggaaacatctaccctggaaatgatacctttgacatcgatccagaaattgaaactggtgatgttcttctataacctagaacctcaatttttaacacctcaatttatatttaaaattagtaatttcatctttgaaaacattgatttggtctgtgatattaggacatagtaagaatgatatacgagttattatgtgtcaggtactgttctgagccctttactataactcaagaatcctcaaggaaacccagcaagtcaaggattattattatccccttttatagaagactaaattatggctcagagagttaaatgatctgccaaagatggagctagaagaggcagtgctgaaattgggctcaggctgtttgtgttcttagctatcgtattccaccatctcttgtgcaggatatgccagtgaagtattaatagatagatataatgtttgtaaaacattatgcttgcaaactcttggtatatataaaactctcctgccccaataccacttcactatcatgcatctttgggggtagattgaaggggaggaatgaaaatcagaacatggaatagcatggcgtattcttcttagcaaagttctatttgcaattatgcctaaaatattagcttaggtcattgagttaaaaaataagtattgaaatacttttaacaacagccactaggatttttttttctagagataatactgataacagtactgaaagggaaaactttctaaaatgctgtcttccttttttggtgtgtgtgtgggatgtctattgaagaaacattgttagtgcataatattttaaaaatagatccctcaaactgcttagaaaatattactgtaattactgcaagtgcttcaaatcctatgcttaggatacaaaaagggggagggactcaaagtttatctaggcttaaaaacgaagacagcatttatataacattaatgaaatagagttcagatctttgtctagcctccatccactccagaaatgtagccacttaggtcttaaaaacacatgagtcacggtaaccatgtggtatcaatgtttatttagcttttaaaattttaattcagaaaaataatagaatctgaaaaataatagaatctgaataactggtcttaaatgtatcagcctttcaaaatgcagtcttatttaagtactgtatcatgtttttgttcctttctatggcagagtgtttctttgtggagccagatgaaccttttcacattgggacaccagcagaaaataaactgaacttaacactggacttccacaggtgaggggagcagacaggagtgtaacttacgtttgcacgtatatattgccacagaactaaaatcacctctgttttctagactcctaacagtggagcttcagtttaaactgaaagccattaatctgcagacagttcgtcatcaagaactccctgactgttatgactttactctgactgtaagtgtgggccaggctgaatttggttccagtctggagaaaaattgttttatctggtaatgtttcatatccttggattacggtgtgataaaaaaatataggatgttttcacttgaatgtgcataagggaagcattgatacatctagctctattttgctataataacaagtttacttgttagttatgtcttctacacctctgtataagttctagaaaagcagggaccttgttttgttcactactatttccagtaccacgaacagtgcctggtatagattttcaaacccaaaaggaataggtgtttttaggttctgtgtggttggctctcagcaatctatggctggctgtcagctaaaggttactgccaagggttcttgttacttagtgtcttcaccatggatgtttccatgtttggggtttgtagtatacatctttaacttattacagtctaccttcaagttataccactgcacacagtgtaagaaccttacgacaatgtacttccatttctcccatcttggccctcatgctattgtggccatataatgtatttctacatgtgttataaacccacaatatatgttattaatctctctctctctctctctcttctttttttgagacagagtctcgctctgtcacctaggctggagtgcagtggcgcgatctcggctcactgcaagctccgcctcccgggttcacgccattctcctgcctcagcctcctgagtagctgggaccacaggcgtccgccaccatgcccggctaattttttgtatttttttttagcagagacggggtttcaccgcgttagccaggatggtctcgatcttctgacttcgtgatccacctgcctcagcctcccgaagtgctgggattacaggcgtgagccaccgtgcccagcctattttttctttaaacagtcaattatcttttaaagtgatttaaataataataaaaacatttttttatttgcccatgtagctaccatttccagtgtgcttcattctgtgtgtagctcccagtttgtatctggtattattttccttctgcctgaagggcttcctgcaacatttcttacagtgcaggtctgcactttcagcttttgtatgtttaaaaaagtattttgccttcctttttaaagttcttattagcatcttttaaataaaaattttacgaatacgtatttatggggtacaggtgatattttgatgccagcattcagtgtgtaatgatgaaataagggtaattgggacaacattcaccacctcaaatatttaccacttttttatgttgagaatattctaaatctactcctctatttatattgaaatataaaataaattattaactatagttgccatattgtgctactaaacactagatcttatttctcccatctcactgtatttttttttttttttttgagatggattctcgctccattgccaggctggagtgcagtggtgtgatcttggctcactgcaacctctgcctcccgggttcaagcgattctcctgcctcagcctccggagtagctgggactacaggcacacgttaccacgcccagctagtttttgtatttttagtagagatggggtttcaccatgttggccaggatggtcttgatctcttgacctcgtgatccacccacctcggcctcccaaagtgctggaattacaggcatgagccaccgtgcccggccctcactgtatctctatacctattaacgaactcttatttatcccccacgcctccccaataccctttctagcctctggtaaccattattctattccaagccttcctttgctaaaggtagtttccttggctatagaattgtaggttgactgtttttttctttagcactttaaagatgttgcttctagcttgcattatttctaatgagaaatctgctgtcatctttatctttgttcttatctatgggatgttatttcccatctgttggcttttaaatttttcctttatctcttactttaaaacaatttgattgtgaaatgctttgatggtgttttcttaatgtttcctgtgtttaaggttcattgagcatcttggatctgtaggtttatagttgtcattatatttgatatttattcagcatgattttcttaaaatatatttgtcacttccccccaccttttcagagattcagagacaaaaacgtctgtatttggttacttggagttgtcccatagttcagtaatgatctgtttgttttatgtctcagtttttttcagtgtgtttcattttggatattttctgttgctatattttcaaattcactgttttttcttctgtgctatctaatgttttctaatcccatccattatttttcttctttctttgggattcagtttactgagatgtgattgacattaagtcccagttttttactcaatagatatttagtgagcacctattatttgtacaagttggaggccctttgtgtaggaaaagcatggcttctccgtagcaaggatttctgactcaatcaagtaacactgagcgtcctccttgcacgaggccataggctgggtcttgcagccgttagggatatgggcagacactgactgtgccctcagttgcttgtcaaagaaagaagcttacaatccctcatgaggagaaatacagtggttgaacttttaaaagtcatttgaaatcttatatttgaagtgtttctgattaccccatatggagaagcttcaatacaatttatttaaatgacaaagttttcaaagaactttttttcttcaggacttgagagaaagagaagaggcagaaatgaaacggattgattttcttgccttgccttccctgtccttgcataaggaagacagtaggaaaactatggaaggtgttctggcctagctttgtcctgcttggcccctggtgtcctgaagtggttattcttgaagcaagatgtgactgttgactccctgtcaccaaaccctttataatacatgtagtgccaacgtgactaagaaatctaggcccagaataaaaatcaaaaaagctccacttgaaatgtctcaaagcagaaataatgagcctttgtattagtaagaattatagcagcactaaaaatctacccctaactgaggtcctgccggaatttgggagaaagcacagttgtaccagttcttgctcacatgaagaaggtatctggaggtacttagaacagagagcaagaggaagtgctcttgttatataagttctttggagtggaaatgctgccctagacatataatgttttagagactacagggtctctgtagaagatctagttcatcgttctcatttcacagagaaatgaagagaacttcccatggttgaacagaattagcaacagatcagagttgagaatctgggtctcctgtccccttgaaagaattgtttcctaattaatgtgtagaggtttcttggctccaaaactataagtatgtttttgactgttttcctgtcttcacagataacatttgacaacaaggcccatagtggaagaattaaaataagtttagataatgacatttccatcagagaatgtaaagactggcatgtatctggatcaagtaagtgatgcgcattactagttttcagaatggttattaaataatgtaaaatggttattaaaatagcaccctctggatatctagaacaacaaatagaagattagaccattttcaagtccctaaacctctacaagtagatcaactctgatgtttcaggcaatatgtgagtcatgaataactgaaatggccttcctctccttgtgccctcacttgcccactcctgaccaagaatgtactcacagtcccccgccaccaaaaccctacatacatcttcccagaccaacacttaccgagtgcatgctgtgtacctacttccaccttagttttcttcattttaatatttttaaatgcccttaagatagggagaatccttatttttacagatgaagaaactaaggctcagaagccaggggcaagtcaggtaggatgtgaccctgcagcatcccacatattatgattgtcttcagtccatttaaaagtgtactgaaagaggaaaggatctactcttagaaatatggacaaaaattcaggtgtagaccaaatactgtcaagaattttggagctgaactggagagaattgcctggaaagaatttatctaattttctagtctctcataagtgacataatggtacatcgtactggacttaatggtcgctagatgaggagttctcagattctaatcagcagaagaatcatcctgggtacctgctatgatgcagtttccccagctctatgcaagccagtaggtctggggtggggcctagaaatgtgtaaatagtccttactcagactatacttggataatcacagttctaaagtttcttactaattgatttgccaagttcagacgtaataatgagatagagtaaataaaatgaaattttgccatgatagtatttttttcactaataggtaacttcaaatatatgaggctcttgagtcacatttgaaacataagcctgttttgtcatctgtatactttataatcattctccacaaacaccagaatgaggaaaatgagagcatacacaagtgtctggcacctaggcattctctcaaatgtttgtttcttaatttgtaagtttctctaaagtcaatttagacatttatgtagtaattatgctccttggcagatactaatgggatgcttcatcacagagctagttttaagtactttcttttttttgtcagcagagagcagtctaacttgttaaatagagacaagctctgtggcagtgtacaatggctgacacctctgcccacctctctccattggctccacgcatggtggccaggacttcgcactttcgattctccaaaatctccataagggtggctctttcttatcactcaggtttcagctaaaaccccctgctccctcagtgaggccttcctttactatgcaatataaatcaacctctctgcttccacattgcccgacactaacctccctcatatagagcagtaggtctcaaactttagcatcacctggagggcttgcagaaacccagtttctgattcagtgggtctggagtaggacctgagaatgtgcatctctaacaagctcccaaaaaatgccaagaaccactgacatagagtgatggacactggaaacaaactgcacagattttcccccagctctttcactgactagccctgcaactgtggggaaatcatgtgacctctctgtgcttcaggtttctcgcctgcaaagtggggataatcatgcttacctcattggagttgctgtgaagatcaaataggttaacacatataaagtgtttagagctatgtttggcaagaaatgtgctcaatacatgttagctattgtgatttatcttctttctattacttactcctatctgaaagtattttgttatgtgtttgtttacttctttgtagtagaatagaagttccacagatcaagggccttgtctatcttgttcaccactgtatcctaacatctagaaaaatgcctgacacatagtgaatgcataataaatattttatacctagataagtacattttaatagaatatgcagggagatgggcctgggcatggtggctcatgtctgtaatctcagcactttgggaggctgaggtgagaggatcacttgagaccaggagttcaagaccaaccatggcaacaaagtgaaaccctgtctctacaaaaaaattaaaaattagcccggtatggtggcatacctatagttccagctacgagggaggctgaggaaaaaaaaaaagaatatgcagggaggtaattgtattaagaacaaaagactacaggcttataattaaagatcttggaatgatagttgtggtgatttttcttttttttttttttgagatggagtctcgctctgtcacccagcctggagtacagtggcatgatcttggctcactgcaaactccaccttccaggtccacgccattctgctgcctcagcctcccaagtagctgggactacaggcgctcaccaccatgcccggctaatttttttgtatttttagtagagacagggtttcaccgcattggccaggatggtcttgatctcctgaccttgtgatccgcctgcctcggcctcccaaagtgctgggattacaggcatgagccaccacacccagcctcagttgtggtgattttttaaaagaaagacttttgcccttcttcaaatactaattggaagaccgtttatcagggcttctttgttgtcttaccagaaagaatgcttgaattatttaaatgattctaaaaagaagatgtcaccatattaatgtcccactacataagcactatgtaatcctctttgctttcagttcagaagaacactcattacatgatgatctttgatgcctttgtcattctgacttgcttggtttcattaatcctctgcattagatctgtgattagaggacttcagcttcagcaggtagggaacgttgctttctaggaatgctactgacattttgattgacagagacattcactgtgcctcccctcttttccctaaaggagtttgtcaattttttcctcctccattataagaaggaagtttctgtttctgatcaaatggaatttgtcaatggatggtacattatgattattattagtgacatattgacaatcattggatcaattctaaaaatggaaatccaagctaaggtaatttttttcctaatcatgctattgttagtgtcagatttgcactaatggtaatgtatttttccagaatgtaagaattttcagaatgaattgtttcttccaaactgtatatcaagtagacttgaaattggtaatggtaattttcttaaatctagtcaggaggtctcttaggcagagtttttcaaagtgtgatccacaaaccattgcatcagaatcattgggtgcctggtaaagtgtaccatgttagacctactgaattcagactcttcggcggggcctgtgaattcttacacacaccaaaattcatacacaaccaaggtaactaaggtaagagtttttttttttttttaatcttacaagaaatgctcgaatctttaacaaaaatgagtggggctataggggaaagtgaggtcaaggcactatggtgtgcatgcttgcatttgtttcctccgtccattcaaagtgagaatgctcccattttcttactttaccattgatgtgctacaagcttatttattttaagactaacctagcctaaaaatcaactgtccccacaaaataaaaatcacattaaaaaaactaatagtgttcagactaatcttgctcaaacttatgtttccctagtcttgatgcaactgattgagtcacctggggagttggttataaacctgggcagagaccccaaatgcaatggctcagagaagataggagcttatttctgtcttatgcaatagtcagaatgggttttacagactggtgagtagctcaacatctcacagtcattcaggcacccatgttcctcccattttgtttctctgccaccccttaaggacttgccctgactgcatgattattgccgtgttgcctcaaacaggttgcagcttatgggaagcaaaaacacggtatggtagaagctctcccatagactgatggcttggctcaagagtggccgactttatttctgtacatatcccactggatagaatttagtcaatcctaactgcagagggagccagggaacacagcccaggcatgtgcctaggaaggggagaatgggtttaggttgacacttagcagctgccactatatgtggctatagtatgtatcattggaatagatgtttaactttagggacaaataaaaaaccaaaacaaaaaaaggagtaaggggagagatttgcagcaaatctttatttttaccaacctcaactatcattaatttcagtgaaccctaaatggtatccaacaaaatatctttctagaccattcaccgtctctgcctcatagatgatcatatcatgttttcttctcttctgaaacctctaatacccttgtcctatcctcattctaagctgatgaccttacttcctatttcacaaaaataatagaaaaaaaaaacagaatttccacaaacccccacctaatttatctgcctcctgccatcagtgccaatatactgtgcttttcttctgtggatacattatttaggccactattcagggccaacccctccacctgcctactagaggccatcaccacttgtttattcaagggcacagctccaggtagttttccttctcttggggatcatcagtttccttctgtctaccaggtcattcccattagcatgtttttgccgcttttcttaagagataatatctcaaccctaattcctcccgctaacttactaccatcatttatttagtaaaatatctcaaaaaagtagttaatcttgttgtttctgattctgctcctcccctcccccacctgttttttttaagagacaggatttcactctattgcccaggctggagtgcagtggcgcgattatagctcactgcagcctcaaactcccgggctcaagcaatcctcccacctcacagccccccaaaatctcattctttcggtgtctgttccaatcaggctgccctgccactccaaggaaagtgttcttttcagtgtcctctcatgctgataagtccaataaccaactatgtaccctcatgctgacctagcagcagctttgaatactgccaagcactccctttttgttgacatgctttcaatggactatcacctggttttcctcctaagtcactggctggtcttctgactttgctggttccctcacatctcaccaacctattaaggtgataatgcttcaaggcatagtgcttggacatcttctcttttctgccactgtcttggtaatctcatcctgtcccacagcttagtatctatatgccaatgattcccaaatctatacccccacttagaattcttccctgaactccagattcgcatatccaccatttagtctatatctccacttggatgtctgcttttcctctcaaatttaacacacctaaaacagaacatctaaagcccccacctctgcagtcaaaacctgcttttcccatagcctttcaaatttcggttaatggtaactctcatcagttactcaagccaaaaatcttggattcatcacagactcctctctttcactaatctcttctttcccacatctaatccaagaggaaatcctattgttctaccttcattggccaggcactgtgactcatataatcccagcacattgggaggctgaggcgggaggatggcttgagcccaggagttccagaccagcctgggaaacatagtgagaccccatctctacaaaaaattaaaaaaattagcagtcaaggtggcatgtgtctgtaatccaagctacttgggaggctaaggtgggaggatttcttgagcccaggaagtcgaggctgcattgagccacaattgtgccacggcactccagcctgggtgacagagtgagacccctgtttccaaaaaaaaaaaaaaaaaaaaaagaataaaaatcacctggtcaactccactattaccagcctggtccaagctactatctctcatttatattattgcaatagcatcctcactcctccaacaacctgctgtcaaccacagcagccaacatctgatcatatcacttctgtttgtggttctcaaatctccccaattgagttacagtaaaagacaaacttggtgagtgccaccttatctctataactgtataccctttctattgctcactccagccagatgcaatatccttgccaagcaccctcctgtctcagggcctttgcacttgccagtccctgtgcctggaaggcttctcccctagatttttgcatgacttctccctccctcccttcagatctttgctcaaatgccttctttttagtgtatgtaaaatgacaaacccatacccattccttatcccctcctctgaattttctcttcagcaattatcagcagcaagtgtcccaaagtttctattaacttatttctgttgtctctttcttccctccactagaatgtaagctttatgagagcagagacttttgtttgttcactgctttatccttagcacctaaaacagtgccttactcatagttacctcaatatttattgccaaatgaatttctgctttataatctgattatatttttccactctctcttagagtctaactagttatgatgtctgtagcatacttcttgggacttctaccatgcttgtgtggcttggagtcatccgatacctcggtttctttgcaaagtacaacgtaaggaattccacggatctccatgctgttggtatttctctcaaagttattgcactgctttggctaaaggacaaaaccattctaatggcctctcttactttcccagctcctcattttgacccttcaggcagcgctgcccaatgtcatcaggttctgctgctgtgcagctatgatttacttaggttactgcttctgtggatggatcgtgctggggccttaccatgacaaggtactgataaacaacttttttcctgttactattaagcttttagcatagtgccagtggcttgttatcctttttcaatgaactccttttattttgtgattcagccttaaaatgttgaaggtagtatatctagtgccatatttataaagtgaaagggtgtgaccagcttgagagaatatttgatgtactcaactgtctcacattctttcttgcaatatatcaggtaattaagtcccgtttaccaccagtgaagtcaagtttagtcaatttgattcatcgatatatccaaaagcagtctcttcagataagccttctcaaaatgtgacattatttaaaaagtagcatagggggaaacttgtagaaatatttgaaaattttattactagagctatagtctggaatattatgctcttatcttaaatgaaatgaactttaaaatgagatgtatgagcatgcatggttgggacctgggtatctctgcacaggcatttcaaggtctctttaaggtaaagggcagatgcaaggcttgattcaaaaaagcactgagggtgcagagcagctcctacatttgatttaggctagtttaagagaaagctgcttgtctcaggaaaaaatagtaggcttatttatgttatatgcatcacaaagcaaatgtgtgtggttacctcaggttatttgtttgaaaatggtagcttgggttatctggtccctttatgtttaatacaatgtcatgaacaaaggtctccaatgggaaggaacatggaataaagtgaacttttctcttttctttttccagtttcgttctctgaacatggtctctgagtgccttttctctctgataaatggagatgatatgtttgccacgtttgcaaaaatgcagcaaaaaagttacttagtctggctgtttagtagaatttacctctactcattcatcagcctctttatatatatgattttaagtcttttcattgcactgatcactgatacatacgaaacaattaaggtaggtttatcaagagccataagtagtagcattgtcctataacttgtagagtagcagtaaaattcagtacctaatggtagaagaaaagttgatggaatgttaatttcttcaggatagagaaaaaggaccttatttttagaaattgataaatagaactagtggaaaaattgaatgttgaaagtcttagtctctaagtagttatactttctcacacaagctttctaaccttttattagaattataagggtcattagaagtctggggggcaaagagtaaaaaactaaataaagaattataagggttagtagatattgtgtgaataaaacatatggcatttcagaaagccaaaatattgtggggaacataaaaactccaattttcataaagaaaaattgacccctttgttttgagtgtactgtaactgagcccattttctttgcaaggccctgcagggcacaagcccaggggcccagcctccagaatagcaaaaggattaatgggtccagtactagcatgtagctttatacagtcagatacctgaactgaaaagctattgtcattcatataaaatcttttaaaaatcaatttgagcctgttgaaatatggaaaggcagaataaatatccatatatgtttcaatttccataacttatactgttaggtgtatttgtggcatagacacttccacttggggacttttctttctgggtatgagagggataaagaaacatgaagccatgtgattggccctagggataaagagaacgccttggtttgaagctgataatgatgaatactttgctcatgaagccagggctgtgacttcatcctcactgaacaagatttcagggaccgaatgtcctctttgctctcatctgcttagcagatgtgtccttaggatcaccaaggcaactgggaaagaatgtagttgtaacttcagatccctccaaatggtgctctaaaagttcactgcctccaactctgcgtgcagagaactgtgtgttattcgagggtgacatctgagagctctaaggataacatgggttttcacctttgatgacataagcctgaaactcgtattttagacgctaacctctttccgtgggctcagagcacttgccaaatgggcaagctaagttacttctgatcctttctaatcatggcatgtcctagaaattttaggtcccaaaccgatataaatatgaggcccttaaacaaacttgcctggctggaagactgactccaaaagggtgtgcagattggaaaggtcccttacagcattcagacctttgtccagacacttgggccaactcgagagagtccaagactgtgctgaggtgttctgggcaaggccagggatttccatccctcggcctactagaaaaccttgttaatttagatccactgggcttcttgtggcctgaaccatgttccttcaaaaatgcctgcatcacactggtctggaagtcacaggcctgcagggcagagtagtgacagaggttctcggacttgggatggggctagctcaattctccctggaaggacgactcagacttcgactcagtgtgcccatttgggtttcagtggacccagaaagagagctcaggtaggcagctgcagaatcccaggcccactttacctccgccaaacctgagtgactctagaggctacatctcctttgcaggtactcaggagtaacgatactatctctctagaaaaccccctcccttgccaaatgatccattttgaatttggaatgaagctgttttcaaggagcttattaataaaagctttttaacattcttctgtttagcaataccaacaagatggcttcccagagactgaacttcgtacatttatatcagaatgcaaagatctacccaactctggaaaatacagattagaagatgaccctccagtatctttattctgctgttgtaaaaagtagctatcaggtttatctgtactttagaggaaaatataatgtgtagctgagttggaacactgtggatattctgagatcagatgtagtatgtttgaagactgttattttgagctaattgagacctataattcaccaataactgtttatatttttaaaagcaatatttaatgtctttgcaactttatgctgggattgtttttaaaaaaactttaatgaggaaagctattggattattattatttcttgtttattttgccatggctttagaatgtattctgtatgcctctcttttgctctgatactgttgctcctgctattctgattgtgcagactgtataattagtggaaaacaatccttggtctgactgtgactttggacaactcagtaaccctggcttggaccactctcaggagtccatccttgagagagtgggtgtagttaccatttatacagtaatcattgcattttaaaatcttctcttgaaaggaagaataagagtgcaccagaataagagcgcaccagaataagagcgcaccagctaacaatgtgatacggccatatgtcacttaaggatggagatatgttctgagaaatgtgtcattaggcgattttgtcattaaacatcatagcatgtacttccacaaacctagatggtatagcctactacacacctaggctatttggtatagcctgttggtcctggggtacaaatctgtacaacatgttactgtattgaatacagtaggcaattgtaacacaatggtaagtatctaaacatagaaaagggacagtaaaaatatggttttataatcttctgggaccaccattgtatatgcggtacatcattgaccaaaacatcgttatccagcatatgactgtatttggttatgaaagccaactgttacttgattctgcttttagttcttaagaggatcaggcttttaaatactcatttacaagttttctatcctccttcagtgttaaagtagaaagtaaaaagagtatcttatacatgcatgaaattaaagcatataccaaatgcatttttgatgaagtaattattattttattagtacttgagcagcctgttaaaactagtgatgtactatacctttcataggcacattatgtctcacagcgaagtgttttggggtgagaggctgtggttttatggggcaaggttctataactcacattaaaaatatttcggggctatgcacagtggctcatgcctgtaatacctcactttgggaggccaaggcaggaggattgcgagagcccaggagtttgagaccagcctaggcaacatagtgagactcatatctacaaaaaaaacagaaaaaactaaccgggcgtggtggtacacgcctatagtcgcagctacttgggaggctaaggcaggaggattgcttgagcccaggaagtcaacagcagtgagctgtgatcatgccactgcactctggcctgggtgacagagtgagactctgtctcaaatatgtacacacatatatatatgtgaaaataattatgcttaaaattttaagataagataaatgtgtgctgtaaaaagacataatagtctctaccccttatagactgctaattgagaattgcagggactttcaacacatgaatatttattgtgtttactatttattcaaatagaagtgaattcagttatgtgcagtaaagatcttctcaaagcaaactttttttaaaaaaactgatttttaaatttctaattttgttttactgagatttttattatttaattataatgacagtcataataatgactccaggtgttgaaatgggaggttttataacaggtataagctgtttctgaagtacctgaggctttaaaaaaaaaatctaaatatctaagtgactattttgggggcagttctaatatttataatactatcacttttagaaattactagaattctatgtgagttttgaaatcatgtttattatctgataagtccttttctttacatcttttgagatttttagactaacagtacttcaatggaaacatgaaaacactgacgcagtgttgggcctggagttttgctttgctctgaagtcattatatttcttctgtagaatcacagccaatgacttgctgccttcacatctctctcctatttctccaggctctcttattgtggcaggagtccctgataaattccaaggcttaatttttagtaatgatgtccatgagagaatagctcttctgtctactgaaagaaatagcactgactgacttttttgaactgtcctcaaaccagtacaatggcttgatctgggtaggcagataaattatgggccattttagagctctccttacatgtatatatgtatcatagagaatgtcaaggcagttgtaagaaagaacatagaatggaagtcacttttcttccaggcttctagtcttcttatcccaggaaatcagggctggatttttgtcgatgataccccctttttctggaagtcagattctctgtcccctcctcctgccataatgattttcagggttgtaagcataaggggatttttttttttttttcttgagatagagtcttgctgtgtttcccaggctggaggctggagtatagtggagcaatctcacctcacttcaacctccgcctcccaggttcaagcgattcttgtgccttagcctccagagtagctgaaactacaagcacacaccaccatgcctggctattttttttgtatttttagtagagacagggtttcgctatgtgggccaggctggtcttgaactcctgtcctcaagtgatctgcccacatcagcctcccaaagtgctggaattataggtgtgagccaccatgcccggcccactgggggatcttgttaaaatcatgaatgtacaggtaataccagcagagatattcatattctctctctctcctctttctttctttctttctctcttttctttatctttctctttctctttttgtctttctctttatcaaagcctaagcacagattcttattcatcatgtcctgggggaggccaggaatctgccatttttagccagcacacaaagtgattctgacacaagtggtttgtggtggctgcagggcccagagctcaaccaggaacagataaatccctttgttgggctacaaataagttgtttataagtctcagtattcagaatggtcttctatcactcaagagagaaaccacagtagtcaagagagaaacaccaagaaaatgggcttatagatatcaacgtggatattttagtatttgtgtctgtaaaaatcatttttgtgcagacattgattttgctgttacatttttttaaacaattcagatgccattttcttttttcactcaataaagttttaaattatctaatacatattgagttttaatttttttatcccaccacactattttcaaattaaattaatacatacaaataggtgtatggattagaacaaaaaaggtaaaactcattatttgcagatattataatctacatagaaagtctaatagaatctaaaaaacacatgggtcaaagaagaaatatccagaggctgaggcaggaggatcacttgagcccaggaagtcgaggctgcagtaagccatgattgtgccactgcactctggcctgagcaacagagtgagaccttgtctcaaaaaaagaaagaaagaaatcttgagaaattaaaaattattttgaactaaatacaaatgcaaacacaaatgatcaagaattatgggaaacagtaaaagcagtgcctagaggaaaatttatagcattgaatgcatatattagaaaagaagaaagatgtaaaaatcaatctcctaagcttctaccttagaaaatggacaaagaagagcaagttaaatccaaaggaagtagaaaaaaataaaaattatagcagaaattaatgaaattgaaaacaggaaatcagtggagaaaatcaacaaaaccaaaagctggttctttgaaaagacagataaaatcagtaagcctatagccaagctaactaagaaaaaagagggaagatgcaaatgactaatactagacatgaaagagggagcatcactacctatcccatgggcattcaatggataataaaagaatatatgaacaaatctatgcctgcaaatttgaaaacctggatgatatggaccaattccttcaaagacacaattgccaattgacaaaactaacacaagaataaacaaacaatctgaataagattctagtaaataaatggaatcaataatgaataaccttccaaaacagcactgggcccagatggttttacgggtgaattctactaaacatttaaggaacaaataccaattctgtataatttcttccagaagacagaattagaatacatcctaatcattctgtgagaccagcattaacttaatatcaaaaccagagagagattataagaaaagaaaactaaagatgttgatctcttatgaacatagatgcaaaaatcctcaacaaaaatattagcaaatcaaattcaacaatgtatgaaaaaaattatatactacaagcaagtgggatttattctaggtagcaaggctgattcaacattcaaacctgaattaatgtaatccctcacatcaacaggctgaagaaaaaatatcacatgatcatgtcaatacatacacaaaaagcatttaaaaaaaatctaacatccattcatgaaaaagccctcagcaaactaggaaaaagggggaacatcttcaacttcataaagaacatctacaaaaaaaacctagagttaacatcacacttaatgatgagaaacttagaagtttttatgctaagatcagcgacaaggcaaggatgtcccctcttaacactccttttcaacatcatactagaagttctagctaatgcaataaaatacaaaaaggaaataaaaggtgttcaggttgggaaagaagaaataaaactgtctttgagatgacatgattgtctatgtaggaaatctgagagaattaaaaactcctggaactaataagtataacaagattataggatacaaggttaatacacaaaagtcaatcactttcttgtatatcagcaatgaacaattataatttgaaattaaaaacacaataccatttgtagaaatatcccccaaaatgaaacacttggctataaatctaacaatatgtagaaattctatatgaagaaaactgtaaaactctgatgaaagaaatcaaagaactaaataggtggagagatatttcatgtttatgaataagaaggctcaatattgtcaagatgtcagttcttccaaacttgatctataaatcaacacgaccccaatgaagacccaagggagttattctgtggatataaaaaaactgattttaaagtttatatggagagtcaaaagaccagaatagacaacacaattttgaaggagaggaacaaaacaaaaaacaaacaaaaaaaccaaaaaaacactgcctgatgtgaagacttactataaaactacagtaatcggctgggcacagtggctcacgcctgtaatcccaggactttgggaggccgaggtgggtggatcacctgaggtcaggagttcaagaccaacctggccaacatggtgaaacccataacccattttgtctctactaaaaatacaaaaaaaattagctgggcatggtggcaggtgcttataatcccagctactcgggaggctgagacaggagaatcacttgaacctgggaggcagaggttgcagtgagctgagatcgtgccattgctctccagtctaggtgacaagagtgaaactccatctcaaaaaaacaaacaaacaaacaactacactaatcaaggtattggtgaaagaatagataagaagatcaatgcaacagaatagagaacccaggggccagcgcagtggcccatgcctgtaatcccaacactttgggatgccaaggtgggtggattgctttgagcccaggagtttgagaccagtctgggcaacatggcaaaacctcatctctataaaaaatacaaaaattagccgggtgtggtggtgtgtgcttgtagtcccagctacttgagaggttgaggtgggagggttgcttgagcccaggagatccaggctgcagtgagtcgaggtcatgccactgcactccagcctccagcctgggcatcagagtgagatcctgtttttaaaacaagaatagagggcccagaaatatacccacattaatatagtccactgatctttgacaaaggagtaaagagaatacaatggagaagatagtctgtttaataaatagtatggtaataactggacatccacacgtaaaaacacgaacctagacacagacctttcactctttacaaatattaagtcaaaataaatcatagatgtaaatgaaagttggaaagtaaaaactcctagataataacacaggaggaaatctatatgaccttgggtttggcaattaccttttttttctttttcttttttttttgagacggagtcttgctctgtcacccaggctggagtgcagtggcgcaatcttggttcactgcaagctctgcctcccggattcatgccattctcctgcctcagcctcccgagtagctgggactacaggtgcctgtcaccacgcccagctaattttttttttttgtatttttagtagagacagggtttcaccgtgttagccaggatggtcttgatctcctgacctcgtgatctgtctgccttggcctcccaaagtgctgggattacaggcatgagccaccgcgcccagcccccaccttttttttttcttaaaaacagtttattcaagccactatttgaatatttcttttttttcaccttttaatatttcaataggcttttggggaacagatagtgtttggttacatggataatttctttagtggtgatttctgagattgggtgcacccaccactcgagcagtgtacactgtacccaatgtgtagtctttcatccctcaccacctcccaccctttctcctgagtccccaaacccattgtatcattcttatgcctttgtgccctcatagcttagctcccacttatgagagagaacatacaacgttctgttttccattcctgagttacttcacttagaataatggtctccaactccatccaggttgctggaaatgccattatttctttcctttttatggctgagtagtattctattgtatatatatcacatttttttatccactcgttgattgatgggcatttgagctggttccatatttttgcaattgtgaattgttctgctataaacatgcatgtacaagtgcctttttcgtataatgacttcttttcctctggttagatacccagtaatgggattgctgaatcaaatggtagatctacttttagttctttaaggaattcagactgggtgcagtgactcacacactttgggaggctgaggtgggtggatcacttgaggtcaggagttcaagaccagcctggtcaaaatggcagaaccccatctctactaaaaatacaaaaaaaaaaaaaaatagcggggcatggtggcatgtgcctgtaaatccagctacttgggaggctgaggtggaagaatagcttgaaactgggaagcagaggttgcagtgagctgagatcacactactgcactgcagcctgggtggcagagcaagaccctgtctcagaaaagaaaaaaaaaaaaaaaaaaggaatccccatactgtttttccatagtggttgtactagtttacattcagcaccagcagtgtaaaagtgttcccttttcaccaaatccacgccaacatctattatttttttattatggccatttttgcaggaataaggtggtattgcattgtggttttgatttgtatttccctaatcattcgtgatgttcagcattttttcatatgtttgttggccatttgtatatcttcttttgagaattgtctgttcatgtccttagcccaatttttgacaggattatttgttttcttcttgctgatctgtttgagtttcttgtagagtctgggtattagtcctttgtcagatgcacagattgcaaagattttctcccactctgtgggttgtctgtttgctctgctgattgtttctttcactgtgcagaaactttttagtttaattaagtcccatctatttatctttgtttttgttgcttttgttttgggttcttggtcatgaagtctttgcctaagccaatgtctagtagcatttttccaatgttatcttctgtaatttttacggtttcaagtcttagatttaagcctttgatccaccttgagttgattttttgtataaggtgagagatgagaatccagtttcattcttttacatgtggcttgccaattatcccagcactatttgttgagtagagtattctttcctcactttatggttttgtttgctttgttgaagatcagctggctataactatttggctttatttcggggttctctattctgttccattagtctatgtacctatttttataccagtaccatgttgttttggtgactatagccttatagtatagtttgaagtcgggtaataagatgctttcagatttgttctttttgcttagtcttgctttggctatgtaggatcttttttggttccatattaattttaggattttttttctagttctgtgaagaatgatgctggtattttgacgggaataacattgaatctgtagattgcttttggcagtatggtcattttcacaatattgattctacccatccatgagcatgggatgtggttccatttgtttgtgtcatctatgatttctttcagcagtgttttgtagttttccttgtagaggtctttcaccttcttggttaagtatattcctaattttaaaaaattttttgcagctattgtaaaagaggttgagttcttgatttgattctcagcatggtcactgttgtatagcagggctactgatttgtgtacattgattttgtatcctgaaactttactgaattcatttattagatcttggagctttttggatgagtctttagggttttctaagtatatgatcatatcatcagtgaacagtgacagtttgacttcctctttaccgatttggatgccctttatttctttctcttgtctgactgctctggtcaggaattccagaactatgttgaatagaaatggtgaaagtgggcatccttgtattgctccagttctgtcaactttccccattcagtataatgttggctgtgggtttgtcatacatggtttttataagcttaaggtttgtcccttgtatgctgattctgctgagggttttaatcctaaagggatgctggattttgtcaaatgctttttctttatctattgagatgatcatttgatttttgtttttaattctgtttatgtggtgtatcacatttattgacttgcgtatgttaaaccatccctgcatccctggtatgaaacccacttgatgatggtggattatattttgatatgctatttgatatggtttaactgtgtccccaaccaaatctcatcttgaattcccatgtgttgtgggagggacctggttgggggtagttgaatcatgggggcaggtctttcccatgctgttctggtgatagtaaataagtctcatgaggtcggacacatttataaggggaagtttccctgcacaagctgtctctgtgcctggtgccatccatgtaagatgggacttgcttctccttgccttctgccatgattttaaggcttccccagccacatggaactgtaagtccattaaacctcttttttttttttttttttttgagacagagtttcactcttgtcacttaggctggaatgcagtgatcttggctcaccacaacctctgcctcctgggttcaagtgattctcctgcttcagcctcccaggtagctggggttacaggcacccaccactatgcctggctaattttttgtattttttctttatagtagagatggggtttcaccatgttggccaggctggtctaaaactcctaacctcaggtgatccacctgccttggcctccaaaagtgttggaattacaggcgtgagccactatgtctggcccattaaacctcttccttttgtaaattgcccagtctcagttatgtctttgtcagcagcatgaaaacagactaatacagtaaattgg

SEQ ID NO: 1672 - DNA, 1762 bp, Homo sapiens
gcgccctcgccgcggacaccggagctgcggccgctccccgctgtcccccagagatggcagatcctgaggtagttgtgagtagctgcagctctcatgaagaggaaaatcgctgcaattttaaccagcaaacatctccatctgaggagcttctattagaagaccagatgaggcgaaaactcaaattttttttcatgaatccctgtgagaagttctgggctcgaggtagaaaaccatggaaacttgccatacaaattctaaaaattgcaatggtgactatccagtacttgcagctatacaatgtctccgttgggaatcatgcttatgagaacaaaggtaccaagcaatctgctatggcaatctgtcagcacttctacaagcgaggaaacatctaccctggaaatgatacctttgacatcgatccagaaattgaaactgagtgtttctttgtggagccagatgaaccttttcacattgggacaccagcagaaaataaactgaacttaacactggacttccacagactcctaacagtggagcttcagtttaaactgaaagccattaatctgcagacagttcgtcatcaagaactccctgactgttatgactttactctgactataacatttgacaacaaggcccatagtggaagaattaaaataagtttagataatgacatttccatcagagaatgtaaagactggcatgtatctggatcaattcagaagaacactcattacatgatgatctttgatgcctttgtcattctgacttgcttggtttcattaatcctctgcattagatctgtgattagaggacttcagcttcagcaggagtttgtcaattttttcctcctccattataagaaggaagtttctgtttctgatcaaatggaatttgtcaatggatggtacattatgattattattagtgacatattgacaatcattggatcaattctaaaaatggaaatccaagctaagagtctaactagttatgatgtctgtagcatacttcttgggacttctaccatgcttgtgtggcttggagtcatccgatacctcggtttctttgcaaagtacaacctcctcattttgacccttcaggcagcgctgcccaatgtcatcaggttctgctgctgtgcagctatgatttacttaggttactgcttctgtggatggatcgtgctggggccttaccatgacaagtttcgttctctgaacatggtctctgagtgccttttctctctgataaatggagatgatatgtttgccacgtttgcaaaaatgcagcaaaaaagttacttagtctggctgtttagtagaatttacctctactcattcatcagcctctttatatatatgattttaagtcttttcattgcactgatcactgatacatacgaaacaattaagcaataccaacaagatggcttcccagagactgaacttcgtacatttatatcagaatgcaaagatctacccaactctggaaaatacagattagaagatgaccctccagtatctttattctgctgttgtaaaaagtagctatcaggtttatctgtactttagaggaaaatataatgtgtagctgagttggaacactgtggatattctgagatcagatgtagtatgtttgaagactgttattttgagctaattgagacctataattcaccaataactgtttatatttttaaaagcaatatttaatgtctttgcaactttatgctgggattgtttttaaaaaaactttaatgagg

SEQ ID NO: 1673 - protein, 493 aa, Homo sapiens
MADPEVVVSSCSSHEEENRCNFNQQTSPSEELLLEDQMRRKLKFFFMNPCEKFWRRKPWKLAIQILKIAMVTIQYLQLYNVSVGNHAYENKGTKQSAMAICQHFYKRGNIYPGNDTFDIDPEIETECFFVEPDEPFHIGTPAENKLNLTLDFHRLLTVELQFKLKAINLQTVRHQELPDCYDFTLTITFDNKAHSGRIKISLDNDISIRECKDWHVSGSIQKNTHYMMIFDAFVILTCLVSLILCIRSVIRGLQLQQEFVNFFLLHYKKEVSVSDQMEFVNGWYIMIIISDILTIIGSILKMEIQAKSLTSYDVCSILLGTSTMLVWLGVIRYLGFFAKYNLLILTLQAALPNVIRFCCCAAMIYLGYCFCGWIVLGPYHDKFRSLNMVSECLFSLINGDDMFATFAKMQQKSYLVWLFSRIYKFISLFIYMILSLFIALITDTYETIKQYQQDGFPETELRTFISECKDLPNSGKYRLEDDPPVSLFCCCKK

SEQ ID NO: 1674 - DNA, 31810 bp, Mus musculus
cacacacacacacacacacacacacacacacacacttctatccagggaatgtggtaaacatttcttctctctctgtaaagactttagaaatccaggttaaaatggaagaaaaccttcttaaggcagagacagctcagaggacaaaggtggccattgcagaagaaatggaaaaaggttgtccttgtactacaactgtgctcgttggatacaggcacaaaggactaaggaacagacagacaccttcctagaaggtctatggcttcagagggcattggaattaggtgaagggtggacttgcaggcaaatcttctgggacaaaatgggatgctcagactatttgtaatggttccatggttttgggtgttctctgcaatcggaagcctggcttgcaggaccttggcacggggtgtgcagattatacctccttcagaagctcccccttgcaaatgccatcttgttctgtaatttgtctttctacaactaatcacttgtatattctatgcctttgtctcatttttcaaaagctacatatgagtacatattaaagatgagattttcattcgaagttgaaaaactacccaaagccttctgttttcctgatactgctttgcactgaagtgtctctcttcagcattcaagataacagtatttcctgttttctccggtgggtagagaatcttcagagacagccatgttttcagtggactgaaatctcaccaattaaaatgagcagtgtttgttttctgtgagcagcgtccacaggcaatgagatgcagaagcttcaggtacagaatttgctcactgatatcaagtgcctacgacacagtagatgctcgataaacgttcactgggtgaagtaaaccaacctaggagccttgctttgttctttgatgacgtagaaatgttcccagttagtcctgagcactattgtgggaagttttggacatgttccctcattcacagggcaaaccttccacgtcagcagattagaagtcgcatggaaagccatctcttgagcgatggtcaagtcaactggctgttattttactcattattgttcactgtagttaggtaaaaagtggctcgtagaatcggtactctccagtgcctgcgtggagcttccacgttgctactcagccaaccttattccttactcctgtgagcagccttctcccgactcttcctcctgaggatctagcagcagaaagcagctctatgtccctgcaaaggagctgggcaccatcgccatgaagtccatgctgaacttctatgtgctgggggtcatgttgaccctgctttccatctttgttagactgatagtgtcactgggaggcttattagagagcccattgcccaggagttcctggatcacagggggtcagctagccaacatacagcttctcaagggtcttccagaccatctatccagacctgaggagtgcagtaaacctccctccaggcatcagccatactttgacacactagcatggacaacatgttccatttcccaagaggcagcatcaagtgtctccaaaggactgttactaggcctagcaggacattttttttggggggagggggtcccttaccctgaaagagagcctatttactgtagagctgtgagtgggttttctgcggctctgggatggaggtgtaccagttccagctgttgggagaatggtttttggttgagcttgtttcagttctctgtcctaaaggattcctttggacctaagtatcttctgttggtttactattgagtctcttccacagagttgtatggacagcatctaaggggttgtgcattggctatgaagacagagggaggactatccagtgtccaggtcaagttgtacattaagttctttctccagtgtaatgcacatatgtttgcatataatgtctaaagggctatggtatgatcaggcctgctcagggtatgggtgttccagccactgtgtggcttatagacattttttcccttttagaaaaattattattattattataacttctatttttcttctcgctccagcctcaagatttatttattatatgtaagtacaccgtagctgtcttcagagactccagaagagggcatcagatctcattatggatggttgtgagccaccatgtggttgctgggacttgaactcaggaccttcagaagagcagtcagtgctcttacctgctgagccacctctccagccctctacataaatttttctaatacaataaatgtgaatacacacacacacacacacacacacacacacacacaccccacatacatatatgaatcactactcggacacactccttcgctgcctcaaagttttcatcctgctgtaccataagaggccaaatgactgatcttcatttggcttttcctttgattctaatacagttatatttttgtttcccagtgtatgtgtgtatgtgtgtttgggggcttccattatcatatatggtatatatgatatatatcatgagagagaaaagtgtttttttttttccttaaggaaatgtttaatgttgagcctgaaagacaagatatgatgaaatgcaaggtttgcactgaatatagactgaaatctcataaattaaaatgagtcatgtttgttttctataagcaatgtctacagaaaaggaaatctagaacgtcacacagtatcatgggacaggttctggggagctgtgtgctcttttaacccttgtcctcgggcaccggtcccatgagtacctgttccacgatcctgtgtgttactgtggattgaatcccaggcctgctgcatgctaggcaagtgctctaaccactgagatacacactcctagcccctcaaggaaccattagtgagaaagacatacgaagtcaaaaggattcacgtaagctgaatgtgtgtgtggtgtgtgtgtgtctccccttgtgtgcaccacacactatatatttaaaaagcaacatgtcatccctctcgatgtcacattcaataacacctccccaaatggtattctatctatagcatcctagaaacaagagcaaaaagagtctacacattgcattttaaagaactcattctccatcctcttagtctgttcttgccttggatgtttcagggaagaaccatttccaggactccgtttctaaggcaggggcaaattctatgatggtgaggtttgatctggatctacccagaccacaccttccattcctccgcagaagggtagcatcttggggttgccttcatagaagaggcacttttaagtgtggtagctcaataccctgttgacgtatattttccataacttactttaataagagttcaacctcccagcccggcagtggtggctcatgcctttaaccccagcacttgggaggcaaaggcaagtgaatttctgagttcaaggtcagcctggtttacatagtgagttccaggacagccagggctacacagagaaaccctatctcgaaaaagcaaaaaaaaaaaaaaaaaaaaaaaaaaaaaaaagagttcaaccttccctctagtgcaccacccaccagaggaggtggaaaagaaaggttattaggatgctgggacaatggacctgctagaactagttctttgggtcaattccaatcttctttgttctcagtccagtccactagcaaacaccaaacatgaatcagaagctttagtccagtcaactcggcagacaccacacacgaaccagcagcccctgcaatccagtccacttggcggacaccacacatgaatcagcaactgcagttcaatccagaagaaaccattaggctcccaaaatcggctggaatccttggaagtggcagaagctgcagggacctcaggagaagttctctggcgagtttctctctatgaagtcaccacaaccaaagctcagcaatgcaatctaaaatgaaccaatgcatgtgtgttatcagtgaaggctagcaaggcagagcaaagcaaaccaacgcttgagctcccactgtctgcggggtcatatttatattccttctaaacattatgcatcctttcacaacatagtttgctatagcaaaacctttcgctgtgtctgctctaagcaaagtgtcctttagcctacatgccccaacaaaacaatacttgccataattgatgaaaccaagttaatatttaaactgtataaagtttgcatctattttcaagaggacaagggaaagtgttggtcacatgcttcaaagttaccttctttaggcttggcatggctgtgtgtacttctattcctggctgagagcagagggtagcctgaactcaagagtgtgggaatggtacaggtagtggaatgaggtcgaccccattttacaaagagagaaggaaaaaaaaacacatagaagaagtccccactattatgtacaaagttaaaaatcaaaggttcaaattactattggtgagctcctaatttttttgagtacacatatacatggtgtatgtgtgtgcacatatgtgtacgggcacacctgcctacgtgggcatgtgtggaggccagaagctgacatcagaatgtcttcctctccatgagagagatggggtccctcatactgttcactggtttaggtttggcttccttgcacggttagcccctggtttctgcctccccggtgctgagattactgtgtggaatttcttgtgtgggtattagggatcccaattcaggtctttaggcttatatggcaagcactttacccaccgagctgtctccccatcctctgaacatccagtctttaaataaaataaaaattgcttaagtgtatccataatatttattcactctttaaaaatatacatttttcccaaaatgttataaaggcaaaaatattcacacgtttagtgtccatttcctgctaagaaaagaatcaatgacctgctttgtagtgccatatttagaattcaatgtgagcaaacctaagaaaaacctaagcttgtttcatattcaagacattgttcagtgctggtatgcagcagctctggtttctacataaacactgcagcaccccagaaccacagagaaaatgtcagcaggcagcaggcaggtggatggatggatggatggatgtgctctggccactgcttactgcaaacagccagatactactcttgctttaggaaggacttgacagcgccccctgtctctcctcacctttaaatatttctgtcacgcagcgggcttggctctgtagccgagccagtgtgagtggtctcttgggctgtgctctgagtgtctgtgcagggagctttgaggagagcaagcgtggacgagcttggaaagccacgacctgaggtggatggacagcagacacagaggtgcccctgtgataagtagagatgggagaggaagagaagggaacggtgtgtgtgctctgaagagaggtagaactggagacaagagagggtggtgacagcctgatgtgagtagcccgtgcggccacctgaggccatggttaggtcctggccaggtctggttaccaccgtggtagtaacaggggtctgtatcaatgttatcaccagaggctatgcagatgtccccggtcaggtcttcctcctggagccatctcgatgtccaagggctaagagttgtcttgaacctcaccagctttggtactcaggcgctccagagagcaggcccactccttatctgggcaacttgagagagctggccctcagggcatgagttagggagcagaccctgtccctcactggctgcaccacttgggagagctgaccctggtaatatgggagagctggccctcagccctgagggtgtgagagcagaagagctggccccacccctagctgggcagtgctggagatcaggctctggtagcatgggtgcaggcgagctaaccctgactgtataggagtgggagagccagcccttcctcttgccagctgccacaagcagaaatggccgtggttgttttcacaaagaagaactggcaagccgaacaactcagctaccacctaatctcagattattaagaatcataacacaggcgtggtggcgcacacctttaatcccagcactcgggaggcagaggtaggtggatttctgagttcgaggccagcctgttctacaaagtgagttcctggacagccagggctatacagagaaaccctgtctcgaccccaccccccacccccaccccccaaaaaaaatcataacacgtggacacacctgctattgccttggtgacagatgtctctaaggtagggcttagtactgggcatagaagttatccgctgacacaaatcctgtggctatagtgtaggtttctgcaggggcggggactaagctttccttgttcttcactcttgggtgtactgcaaagatcttctaacactgttttgttttcttattattcccactctcccacttatgatcccatagaaaggcactgcaccataggggatgactgtcacttacaacccagagccacaggaccaagggctgtctatatgcatcatttgttcaggtagatgtcacatggcagataggacaacagcagccatgtgtcatggtgaaattctggaagagccctctttctattaacttttgaggaggatattcactatctctctttaaaaaacaaagccaagaaaccttgcctatttattctttgccgggctgggatcaaacccaagctactgcacatgtgggccaagtgcacatagatcctggagatgttagttgtgaggactctggctgtcaggccctcaaaaagtattactttgcatcatctctgctgggaccagtgacggcacagagaggacttggaaaagggttggtctcacgagtccagtcatgctaggctcaaataaaaacttcctccagtgagactctccttggttgtgcagacaatagtatgttggcaaactattccagaacccaactgtaaatatgttttcagaacaaataaacccagagctaaaaataagctctttgtaaggttaaaggtccctaagaaggaagtgaacctgaagtgctgaacaatgctctcaaggaagctgagataaacaatagaaaccatgtgggagataaacaatagaaaccacgtgctagggtcatgccggccccaagacggtatataaaccccgccctcagcagaaggcatcagatcatcctctcctctctcaagttgctcttctgttcatttgatccgagtcctctctactgacaccatgggttgctgtggttgtggaggttgtggtggctgcggcggctgcggcggttgtggcagctgtggcggctgtggctgtggaggctgtggctgtggtggctgtggaggctgcggtggctgtggaggctgcggtggctgtggtggctgtggaggctgcggtggctgtggcggctgtggaggctgcaacagctgtaccacctacaggtgctaccgggttccctgctgtggctgctgtggtggctgctgcggttgctgtggctgctgcaagcctgtggtagtctgctgctgccgccgctcctgctgccgctcctgtggctgtggctcctgtggctgtggctgcggctgtggctgtgggaagggctgttgccagcagaagtgctgctgccagcagaagtgtggatgcaagaagtgctgttgctagcatggctgctggccccctggcctcggggccggtgatggttggacccaggctcatatacttagacttttagactgtatgccctataatccctcccagttcacctatcaagctgtaaggcttaataaacatagctgagtagaacgcggaagactaaaatacgtctgtgctgtgctgaagatgcctagccatggataaataagtcagcctccctgaatttgctcattcattgatgaaataatgaagctgaactcagaatctctaaggacctcttcttctttaatagcatatgcatcttcgagtccttaaaactgaactcagggcccttccacctttacccatggaagatttcgcttctatttctgatattcatagtgcatgtataatgtgaatacagggagcattataatgtgtttatattttagaatccaccctcagcccactatgaacggccagtgataatctgcagaagactcccattaaagacctcagctgagtgaaagcaatgtgaatatattctattattttgaagcacttgcctttcaagagatgcatgtattatatgtctgcttacattggctgtatacaccacgtgttttaactttaaagtgttccctccttccccaatgtaatttatgaataaaacaatggaaaatactgtgtttcactgtctttgaatttttttttcagactattggaactgatgttttggcaacacaggttgcgaactccaggaaagtttaaaaattgagttaaagtttgacactgaatataaggaaacgaaagctactgagattgagtcaatagactcctgggttgttttacgtgggctaagggctctctccatttagttattcaggagatgggctgaagaagctattgacatggtcaatgcatgacttcttagatagtttagttgtttccggtctatgtggaaaacaaggtagacatagcctagtgcttgcaaagcaatgtggcttgaaagtgacattgttttctttccctctctttctactggtttgaagtagtcacatggtcttacttagctgtaagtggataagtgtgaataagtatggagatgaattaatatgagagaaaattcatatatctttatatatgtataccaatatatcagtggctacctatgcactatgtgactcatgatttttcaagacagctaaggcagctttactacctatttatatgccttggattcttgctggggtagttcaaccagtcaggcagcagactgcatggttaagacctggcttgtcatcatgtgaaccctttgcatgggatggaactgcagtgacagagggttgagaagatagcaggagctggagagtcctgacttatcttacaaatattacctgtccttctagatacaaacatacacatggttcaaactgttttcaaacgatctaatgatggaacctagatactctaaagagttttctccaaacatttgaataagacagcaataactgttttgtttgttattcatttcagtgtcttttcagttgtcctctctgtaaacaaagtggtattttccccagagccgcctgcctttgaaatctggatatgcagtgacaggatggacctttatgagatacacaaagcagcacaaactaaaggcttgttcctctgtctgctatagttgaggaggaccatggcagacatggaaccttcgtctcccgtctagcctctctgccattgcttttatcatagtgtccatatttgatcactttccttctggtgccattagtcaaacctcccacaggttgtaggtgggatgtgtacaaaggatctactttacaagactgggaaaattaaggattaaaaatgctgcatgtgagacaatagcctgaaatgaaacactaatatttagagtaatcaggaatacttgcagagaagattgctttccctaatcttatacaatgttcatattcttactgaataactccaaaataaggatactttatatataatatccttgtatcgtccaataatataaaactatgaaaagtagtttattctaattggatatactttttgtcttcttagatttttacaaggcacatcagtagaggaatattttaggagttatgccacacaagcttttttttttttaaatcagtttttacttacctgtattcatgtgtaagttcatcacacagcaacattagatttttttttctatctgtttcccttcatcctatcataatatgattattggttcccgtcataatcctcacaataacatcctgccctactggactctgaactgctttccacaactcatttttcataagtgctaaactttaaccagaacgttgggataaaaggccaggcagagagctacacgagcccagccaccctgaggaggtttctaactgaaccaggaaaaccatgacgtgctgtgaagggtggacatcctgcaatggcttcagcctgctcattctgatcctgctaggagtggttatcaattgtatacccctgggaatcagcttagtggaggcagactcgacttctcaaaaccccatctcctgctatgagtggtggtttccaggaattataggagcaggtctgatggtgagtaatacctacatgaacagacttggagaagggtgtctgatgcctttaactatgactttcagccttgcacagttaggaatgtgattaccatcaatttataatgttacattgtgaagaatgataatttatgtacagaaagcgatggtccatcttagggaccttaaggcaaaaagcaggttaagtcgttacctatagcatttcttcacaggtgggatgatacctctgaactttattatttaacattaaggaacttcagtttttcttttttaaaacatggtgctggcgatggaactcggggccttaaccactctgtgggatattgtttaaatctattgcctctttttctctgccccatcctgatttctaggtatagggaacgtggcagcagtgggaacttgctctacgggaatgagaagcacccctgcgcatgggtagccttggagatggcatagtgaggcttagcctgcttctcaagggagctggcctaagacatagagttcgaaatcctgggtctcttttataagatgcttggccatggtcatggtgttttatcacagcaatagggaagcaactaagccagtttctgacctcaacaacttttggttttgagtattacatagatcccagaaagcttcagagttctatagtctgatgatggtgaatgggtgttccttgttgaaatctgatgcaaggtgggacaacacagatttcatgcgttcttaacagtgaactatcagagtcaggttctcattgtctcctagaaattgtgatgcagccagtctgggtagaacacatttgtagaatccaattttcagatctggaagatgcactcctagcagtgccccagctgagacaggccatttagaaaaactcagctatctctagatatgaatttgcattgctgaaaacacaggagagaatattttaaagctttgctacaagtagtaaagagcacgaggtagtgatggtacccatctacatctcttgggctttttttttttttttttttttttttttgagaaaccaaggagccagagactaaacagaccagaaaggacaggaggcatagaacattcatttgttgacatcttgctggaaagcctagtttagcgtacatcctgcctagtttccactctacaatcatctgggctgcaattatcacttgtactttatataccagaaaacagaaggctgagaatgttagccaggtcacacaatgggtgtgaaacccagtgctagatttatctaatgccaaagctagttaaaatactgtcgtcctcaatctctgcctcaggctcacagaggtcaaagataaaatccacaaagtaaaaggaccaggaagctgagtcacacaaaggcctacacacctgggaaacacttgagagaatctggactccttgtcttgcctatcttgcttccctcaataaatattaaccaaaggtcattagagcatcaaactcatggagaagtctgatgctctccatacgcagaccctcaagctggaggttagcccgactagtaaacaggtgctaacagcagtgctcggaaggcaagcatactttcatgatccttggcttcacataaaaggatgaatcacattttttttccgaggggagttatgtcccttgtgacatctgtcaactcacttctgcagacactttgtaaagaagaattcactaagtgtgttgagcatttgtttagtccttaaaacttttggccagttgttacatttcaagttagcctcccttcagaaatgggaattttacaggaaactgcatataacacaacctcagggctcattactgattactttatgaagtcatttgttttatgattttatgaccaaccccaatcagaggtgaacctttttatcttttgaaactgtaaccaagtaaaacattatgtagttaatctttaagattatctactaaggggaaggggattgtcaatataaatgttacttgatcaagcattaaaagcattttaaaatgtttgttgtaaaatataatcagaaaggctcttttactttatataaagttaactataagcctggtcttactcattctttttattgatttttacccattacataagggtacttttccaaagccagttattaaaatcttagtggaaaacaaatggctgtaagtcaaactgattagaagactgcatgcaaaccctttacaaagcagagcttctgcactcatgctgagctatggctttaagtgttgttctcatgttcaagaggactccccagagttaggcttctatcacagtttttaactaaggttcttgtgtgcttcctttatgaaaatgtacactttctagaactggaggaaagcctgggttcctgccaggaaaacaaactgtaattatttataaaaagaagagaaggaagactgaatttcacaaaatcttatgcattcaaatatgtttaggaatactcaaccctaccattttagtgcaaaagtagccatagataatatgcaaatggattagggttccaataaaactttatttataaaaatgaggtgacagggtggggagtgcatccttaccagttcttgtcctacttcacttgttatataagatcagaaagcagtgtcttctgggaacaaccaaaaaagcttagtgtatacatgatgacaaagatttcttttccctttccttctggtctttcagctatgcacaggggtagctggacatccatacgtatgtgtggcttctgaattggaaagggatcagtgttcagtgtataaacaaagcttagcaacaacacgaagtgacatgaagtcagcatgcgattagatggggtgatgtgtgctgggaaagctgccttgtgagagacatgaatctcttctagaaaaaccaggcagatgtggctttggaagacaacgggggaaggaacaattagaggcaaattgacatgagcaagggtgctggggttccaggacccaagagtgagtggctttatgaactgtaggtcaatgtgacacagtggcttagagaccacatgtctagaatggctctgaactttcccttcttaggcaagttacaccacctgtggtttgacagtggcacaataggccatacaccaatgctccattcaaggattgttacaaggctggcacagaccaaatcatgtcacgttctaacacctggtatgtagttacagagcctgctcatgttagcagagcagaagagtgggagaaccattccagggtacctaggatgcactgccaagcacccatcacagctaaaaagtcgtaagtggaaggaagcaactgatattctatgttcaacgatacaaaactcttagttaagcgttctagtcatagctgatagatgtctttttaaaaatagaaaactaactcttaataatgtgataccatttacagccctcctcagcagtacagaatgcactatacaccaagcttttgcctgcctttaatcccagcactcaggaggcattaggcagacagatctctgtgagtttgaggccagcttggtctacacagtgagttctaggacagccaaggccttatcttgtttgtacaaacaaacaaacaaaccaaagactcctactaaacatcagagtaaagtatggtcagtacatattagggatccaggagcagagaagggcatgggggaccaatggtcattctcaaatgtaggcttgggaactctggcaagctgatggttgtctgggatgtcgaattaagagcaattaaccagcaggagtggtggtgaattggtccctgccaaaggcaggcaaacaaaaacacgaatttccttcttcccagattgacttgcttaatttacaggaaatagataaggctgaaggagagggaagggagagaacaggggagggaaaggtggagggagtgggagatagcattaaaggtaaatttgggtgatagaacaaattcttttaagattctttccaaaactcatgcactaataagccaccctactctaaaatccaggaggctgcagcccacagggtaaacaggaacgtggacagaaggcttcatagctgctatcgactcttgccctctcagtctttacgggtgaaactgatgttaaggttcacgatacagcgatgtcagattagatttcctctttcgttctcctgggctctgaattcccccaacgggcaataaatggaaggtggcgatgattgagtttttatctgatgagaagagataatactcatctttcctgaaacttccattccaggccatcccagcaacaacaatgtccttggcagcaagaaaaagagcgtgctgcaacaataagactggggtgagtaccgtgcagcgggcttggaagtggagggactgcctcagcagctcctgctgggcctcaggcttgggtgacactgtcggggttggttaaacagtcatgtaaagagtgacaagagagcttctcttctctctagaagtttagctttggagctagcctttgatcctttcctcaacctttggttcatctaaagtataggaagttttgtttttgttttgtttttgtttttggtttgttttttttgagacagggtttttctgtgtagccctggctgtgttggagctcactctgtagaccaggctggccttgatcttagagatctgctttcccctgcctcccaagtgatgggattaaaggcatatgccaccatgcctggcagatcttgttattgaccaaaacgctgatggtttaaaacaaaacaaaacaaaacaaaacaaaacaaaacaaatcactagagtaggatattgagtattttctaaacccagcagacgcctctgattttccagtccttacacaatgtaagtcaagaacttgacaccgagggtctaattctctaaggccgggatagaccactgacaagcacccaaccatcatcaatacatgggactgagttcagcataaaggttttaaatcaatggttcccaatcagatgggaacacacaggttatctcaggagatttcaaaaacacaagtgcctgcctgcatggttcccaagattctgcatgtacaatcttccaaagcaccgggtgattccaacgtggggtggggtaagacccactgtcctaaagggaataaggaggtaggttgtgggcttcctttttaaatcattactttatgtaatgggtgttttgcctgcatttgtgtccatgcctgtggaagtcagaagagggtgtcggattccactgagctggagttgtggagggttgtgagctgatgcgtgagtgctggggactgcatctgtgtcctctggaagaacagcaactactcttaactgttgagccatttctctagccccagaaaataagtttgttcttaacagagcctgcttctggcattctgtttatttaggattacaataatcactttagccacagtgtttgtagtctttgttcctagtactttggtttctactgtcagtcacttttgttcctaaactaccataccttggtgcagtttgacttgacctcacttctacgtgatactcacaggatctcaagacctcctggtttatttctgactctcttaactggaaaagtatctgaatacttaaacgtttctcaaatctactttctattaaaatgtttttgaatataccctttcaagaaaattggtcccttttgtctcccttgaggatacaagcaggtgggaagaagcaagctatttgttatttttcaatgatgttgtctctctgtgcatatatgcatgtgagtgcagtgcccagggatgccagaagagggcactggaccccctggagctggagttacaggatgtggaactgtggatgctaggaactaaatttgggtcctctgaagagcagcatatacccttaaccactgagctgtctttccaatccttaacagaggaacttttcatgtagatcctggctttaaattaggttgttttgctcacaccagttttgaaaataatttgtgcatgcttcagcaaaatcatgggttgttcaaagctgagggtcttccagggctgctgtggagagggggtggggcacagaggcactctatattatctatgccgttagcaatagttctagtcatttaaatagtgactgcctgcctatatcaatgtcataaaacccccttacaatagcttttcatttgctggcaaccaggtgttcaggttacagttggtgccttctgggtcaagataaggccaaggtggcataaaattctcctcccttctcagcagggcaggaagggggcagcagggccttcccggtttcatcctttcttccttccccttttctttgtttcccaacatggtaagattttgctcaaccacttgaatgactggtcactcaggaagtaacaggtccggggtaacagcggctcttcttgatgagaaaattcggtaacttgtataaatcacagtagtgctggagaaccaggattgacagctgatcctagctcccatttctgtgtgcttccagctgaggacactaagtgacaagaatgggagcatgagtatttccgagatgagtttcccaacaagctgtcaaccttccttcccctttctctccgaaatgagaataccagtagatctcttttagggttgttcgaaggattacatgagatgccacacatgaggtcacaatcctctaaggagctaataagggaagaaaaatgctttcctattttcacttttgattttgaaataatcataatcactaacagctttgtaaaacacggaaattattcttgggggggggcacattcaacctttttgttttctatgccaaatttcacagagtttgtgtgactagggttcagacaaggcacaccctttccctccatcatggtcttctcaactctgggcatatttagaccctccacccgtattccaaatggactgtggcactgttgagatagcttttagttgtcattctggactgggagaatataaagtgatccttgcatctgatgggcagagaccaaggttgctgacacatcccactctgccttggaagggcccaatagcaacaagtccctccagtgggcccagctgagttaagctctcaactctgctgcttactgattacttcaggatgctggccactgtccgcatacaacatcagccaaaaatgcgaaagagttggaagccaagagcccagaaataaaaatttaggcagacaaggtctaatagaggttcaatgtaggtagaaccatataccataggaagagggaaccaggtttcagtggccaggaggaattcgtaaacccaggaatacacaagttgagaattttcagagacattaacaagtgtaattatcttttggcaactgtaattcaacagtgaactttgatctccgcctctttaaaaaaatccacacctaattaaactgcactttcatgtctcaggaccacacagggcaagggagatggctaagtcagtaaagtgtctgtcatacaagcattcggatctgagtttggatccctagggctcacataaaagctgggtcaggtggcacctgcctaaaaggctagtgttagaggtgcatcaaggtagatgccggagctcaggggccagccagcttagggaaatggttcactcagttccaggcccagtgacagacaatgtctcaaagataagttggagaatgaaaagcgctatggggagacactccacatcaacctctggtttacacccctcatacacacgaacacacatgcacatacagaatacactcacacacacatgtacaaataccatgcatgtatatacatcaacaaataagggggaaaaagatctaggagcacagactgactggagaactgcagtcagtaactaagactgctaagtgctacacactgctgctgctggaaaacttgaaacatacaatgacgcgtgcaaacgttgctgctttgttttccagatgtttctttcatcactcttcagtgtgatcacagttgttggtgctgtgtattgcatgttggtatcactccaggctctcttggaaggacctctaatttgtaatactcaggccaacagtactgtcacttgtgaattttcattgaaaaacttaaggtgagttgagttttgtcacacagtctcccatagctgtggctaactgtggtgtataatgctaagcttttctccgttctgactactgggacaaacattcgtagggacttggtgagctgataccaatatctaatgtctcaccaagaagtggtggggctgcttcaggtatggtctcatctaaatggtctagttgatctcaggtggcttatacatgcctggtaaacattcatggatatatgcctatgcctctttaaaagttctgggaatatatacttaatttaaacccttggggtacagtagtgggtgaggggaacatttactttctacaaatctgcattatttttgtttaaattttaagcaaaggagtgttttgcctgcatgcaagtgcaccactcatgtgcagtatccaaggaagccagaagagggcactgtacccatgggactagagttatgaatagtttatgagccaccatgtaaatgctgggatctggacccaggtcctctgcaagagcaataacagctcttttaactgctgagctacttctctaggcccttattttttatcatgtgtgtgtgtgtgtgtgtgtctcgagtgtgtttgtactgtgaatgtagagtccattgaggccacaggtgatggatccctgtacaactggggtcaaaggcagttgtgagctgctcctagtgggtgttaagaactgaacttgggtcctctggaataaaagtatgttctcgggacagatgaaccttctgatcatctgatatgaacctatcctatcagttataaaccatagatggcttacattttttgtgtatggtgttcctgtctttgtaatgtttgctggtgctgtgtggataggcatgcatgtgtgccaacatataaggaggtgtcctcctcaatttctctcctttatttactgaattaggagcctgacaattcagctaaccggctaggttcaggaatccccttgtttctgccccatctgatccccctgtcctgggcttccaggtggccaccctgtctccttcctgccctccccccccccccaagacagggtttttttttttctgtgtagccctgactgtccttaaactcagaaatctgcctgcctctgcctcccaagtgttgggcttaaaggcatgcgtcaccactgctggactgtctccttggtttttataagggtgctggggatctaaagtctggccctcccactttcatggcaagtgctttgttcatggaggcaccactcccaccctttgtactttcgaaatatcaatcaatcaatcaatcaatcaatcaatcaatcaatcaatcaatcgaaagagcagctagtagattcatgtggtcatgctatatacttatagacagcgataaaaatatttaagccatgcattggaagttacatacaaatggtccattgagaaaattctatgcctgaatttaggcatacttttcaaaaacaggaagaccaatctaatttactagctatctttaattagccacttagtttcggaaagctaccagatttaacttttttattaaaaaaactgttttctcctccattacctacagtaaaaaaaaaggtctttcaaaatgtgcatggtagttattattgtggactaaacaaaacccaaagaaattcctttaatagtaaggaaaatttgaactcccagccacagttactgcacacatttcaccctcaaggaagcaccagagctcactgacgtagtgggcagcaggcgaagcttcgagggcagcagcactgacatcccctcctagtctagttggggaggccaaggcagcagggtcattaatcctgtggtctcaaggaaaccaataggctcataggccatgtgctgcaaatactgttattctctcaggtccaaagtcagttattgggatctagaaatgtgttcttcctaagagtattccattttattggtatccccccccccccaaatcatcttgagatagatgtgttaggactaaaagcttcttattttatgctacaggcatgcatcattttaatcatgtatttgaaatgttgtgagtaaaaactatccacctggccaaagagcagatctatgttagaaactgctcctcccccccatctctctctctctctctctctgtgtgtgtgtgtgtgaactcatctgctttcctacctttggcaagtagaaaggctacacaaacaggttcacacctctgaggcttttgatatttatttccatcctgacatgagagagcatcagtttatcttaagatcagctgtcctatggagaatgacacaatgtgttcaaatagggttttaagcattagtgctgtgcaaatgtgctcagcaaaccagatcttagctatggtttctgtgtacaatctttaagaatgtacattgggttttactatactggggctcttactgtcttagtaggcacatttaacccttttctttttccctccagtaaatttgatcctgaatccttcaatctgctgtggttcttcaatggcacttgtgtttctcctactgattttaaaaaccccaccatcaataacatggtcagtaactggaaaatacccaactccaactctgaagaagacagacacaggattttccacttctcagtatttatgagtctcctgcttgttggaatcctggagctcctgtttgggctcagtcagatactcattggtttccttggctgtctgtgtggcgtctctcagcgacggagtcaaattgtataaagggcaataaactagaatatcagtactttgaataatttgaaaattgcatttaaaatatatacttttgtaagttcaataatgaagcatcttctagaacacagagtcattttagtgcaaacagatgtttttagaatcatctctgaagcaactttcaaaaaaaaaattaacctatcaagctgggcagggctggtacaggccttcgatcccagcactcaggagcagaggctggaggattcagagtttgaggcctgcctagtttacaaatgccaagacagccaggactatacagagaagctaaagcagaggactggcatgaactcgcactagcgcgtcctgtatgtgcagtgcacctccactccggggggagaagttaccagtgggtgacacaggggagaagcataggaaagcttttaggtttcttttttcctatgtatgccaaaagaacaattgtccacctcatggttacagaagtatgtgtcttagttttaagaaatatatattatgtgttttgggaggaagaccatgttttaaaaatactttaccctcaaagccaaagtgatggaaaaatgctgtgtttaactgacaggcacatggcaattcatcatactctatttttttatgtttgtatctcttcatgatatctgctaagactttggggaaaaaaaatcagccttttagaagctggtttttatgtatgctgatctttaaaagataggtaacaaaatgtatttattgtattaaaatgttatgaaatagaaaaaactaaaaatctacaattttctgaatgttctctctcctacaattgatttcaatctccattttatggggtgtcttagtcagggtttctattcctgcacaaagcatcatgacgaagaagcaagttggggaggaaagggtttattcggcttacacttccatactgctgttcatcaccaaggaagtcaggactggaactcaagcaggtcaggaagcaggagctgatgcagagaccatggagggatgttacttactggcttgctttccctggcttgctcagcttgctttcttatagaacccaaggcggtataccagcccagggatggtcccacccacaaggggcctcctcacttgatcactaattgagaaaatgccttacagctggatctctggaggcatttcctcaaggcaggctctgtgtcaagttgacacacaaaaccagccagtacgtggggcttatgatttgaaagtgggctggagagatggctcactggttaagcacttgctgttcctgcagagaactggactttggttcccagcacccacactagcatctcacagcagcctgtaactccagcttccagggagccagtcccttcttctagactgcagggcaactgtgcacacacaaatacgaaataaacaaatcttagaaagtgtgtttttttgtttttttctttaagtgaactggacagatggttcggcatttaagagcacttgctgttcttgcagagttcccggcatctacatggtggcttggtggcttgcaactgtaacctgaatcccaggggatccagaaccctattctggcctctttgagcactaggctcactcacatggcgggacaaacagacaaatacataacataaaaataaatcttaaaaacaaaacaaaacaacaacacagtcatgatggtaactacaccaccaattataactgaccaagtaaatgagtacattaagaacttgcaagtctctttctagcccaaactgcacgaagacattttccctaaaccacccctccccacacacccaccaacacttaaggcttatctttaggatctatttaatagtctacatacaagagcacaactcagagaacactcaccagaacaatacatttctcctcaaacatgaaggtccttctgtctgtccttctgcgtgtccatccgtccatccatccatcacagactgtaaagatcagggaccgtcccctcccactcatcagcctttctccacttctgctccttagtaagagctctcccccaccctcatcagatacgccaacctgccttacctctggctgagccgttttcgtccctaagtatgtcgtggctcttaaagaatttgacactgactttgtcaagccatctactgttgagtaggattccttttgcactcttgtctgagtttctctttctgttgctgtgaggaaagtatcttgacaaacgctcctttaagaagaaagggttactgtggcacacagtagcttccagctcaagagccagcccatcactgcggagatcaaggcagcaggagctggtgctggtgcagcagctgctcacactgcatccatctgcaagaagcaggtggatgaatgcccctgctcagccccttctcccactttatacaatccagggcaccatgctgaaggctgggggtggaggatggttcctgcccacaattaggaaaagttttcccacaatcacttaacacaaccaagataatcccccacaggcccatctcccaagtggttctagcttcagtcaagctgataattaacattaatcaccatgactctggtgttagtattccacaggcccatctctcaagtggttctggctttggtcaaggtcaagctcataaacactgtcatgactcttctctgtagaatgtagcaaaacactgttagcatttttccttctttttaatttagtatgtatgtgtgttttgcctgggtgtgcctgtgcactgtgtgcatgcactgccagagaaggccatcagcctcccaggactaagactacagatggttgtgagccatcatgtgggagctgggaaatgagcctgggtcttcaagcagagcggccatgctcttaactagtgagccatctctccattcctggtgctagcatttccttctgtgattcttacgctgctacatggcactgtcctacaccagagcagaagctccgtgggtgccaaggcacatgcattttactttctcctggtgtaaccagtgcatagcacagtacctcatgcaggaagggccaaggtattggtctgctgaataaatgctaccttcagcactcagacatgagtggcaacaatgcttactaaattaatatgaaactgctaaaagacatgaaatagaaacaagtttaaaaaaaaaaaagaatgccagctcactgtacttgactgaacaaataagagagctagctagctagggatatctgggatagatagaacttaagacttttctcatcgccctggaaagaggtgacattgtccaggtctctgctcagtcagaaaaaaggagacctaagtttcaaaaagaaacagcctttgacagtaccaccactggtgcaaacagacggcagattatttctatgctctttagtctttaggagactgcaggccacctgaagttatcctcttttgagggcatgcaacctttgatctggtatccaaagtagcaaatgctcgtctgtatacacgcaattgatgcaccaggtcccacctaacactaaaacactacaaggagtcatttgcaaaatccgatgtttctctcttcctccccaccccacccctttggcctttttttttttttttcaggacagggtttctctatgtagccttcgctgtcctagaactcactctgtagaccaggctaacctctcaaactcagaggatctgcttgcctctgcctcccaagtgctgggattaaaggtgtgcatcactccagcctgacttccaatgtttcttcactctcactcctatctccaagaccaatatcattttagcacgcatctggacagcttctgccgtctagaacgcatctctcacatgcatctgaagcttctttccctcagggaaacgtttcataatcctcagtctttaagagtttttacacttacacacttacttgtgtgtttatcatgtgtgtggttgtgcgtgtaccaccacagtgcttgtggaagtcagaagacaacttctgggagttagttctctccttcaaaccccagtcccagggcctgataatagcacctttacctggtaggtcatcttacaactcgcagtcctcattagtgtgcttcattctctcccacaccactgcccttaatctgtcaattccttaggaacagaaaatgcgtctaaaatatttccagaactagaaagacaaatgtcagaattctggaagtagtgtggtaaaatctgctgttcttagttctttgatgctcgttagccctaatgctatctttctgatcctccaggacccagatttgctgttgttgttgttctttgtttaatgaaaaatctgtgtctgttcaagtacctacaaaatatttcttgattatcctgattaggattgaatttgttaatactcattcccatgtccggcccccacacctgtgcctaatcaatataggacattctatctaagaatattcaagtctttgtataacactcattagggaaaataacagcttctgtactaacctcttaggagttccttttatttccaccctttttatgaaatcttttctatgcctgctcagcaaaagaagttatacatttaatttatcaaagtcacatactcaaagtacaagaaggaaccctccccctggattaatggagactcaagaacagtaatgtgaaatctactaagccttggaactttcctcaccctcttagtaaaaaggaaactgatgatgtgcaaagaatattgtagctgaagtctaactgttcttgaaaaaaatacacttttgaatactaaaggctcgatattagcaaggaagtattacaatagaaaaaaggtacataggcttataaaggttttgtttttgcttttttaaaaataaacctgaatcattctcatagatacaataaatgagcaaaccatttacagtgctagcaagccctgtgctggggtggagatctgagaaacccaggtggctcttgtgacccacaagtcactaattcactacttgcccctgggacaggagacttggataagatattcagtccacagccccataggatgaaataaatctttccatagacattgctttggttgacagtttattaaatacactacatttataccttattttttaggtttttaaatcattcacacatggacttggtaaaaacatacttgatagaaaactaagatgaaagtcaaaacagcattgcacacagacagactgctgaactgttaggagtttttagccccgcctgtgcaggtaggcgatgaagcagagtcaggtggtttgacttcagtcctgcacagcactgtgacttagaaagcattacagttgagatgtagatacaaaaagcatctatcaaagaaatcgcttcatcatctgaaaacaggacaaaacacttttctttcacagacagttttctaaactcactctttatgactgccatttctgtttagagaattagctgtacagactggtgaggccacaaaaattattttctttaaaaacaaaacaaacctagagcctatttacaagacatgcaaaaggagagtgtataggtgccactgcacaactggctgaacgcccatcagcagcaccacaggccttcactctacagatacagggccttccctgcactctggagaaatacattttcagggccgtcatacgatgatgcaaagacagaaacaatgaagtttgcaaatcctttatatttccaggtgttgagacaatatatgtgaatgctgaggttacctctagcgtcgaaaccagagccagctgttaagcagccagaacgctacagtgattgaatacatgaccatttctcttttagcacgctctttattctcctcttccagaagttggagacgtctatttaatttgattatctaagtgaaagacaaatacaaaatacaaaatggtactattgcatgcatacagcaatcagatttttaaaaaagtcgtatataaacttgtcaaagaaatcattacatataaagttccattctggatcaaaatgaacaaaattataaaagaaaacaaaatactacccacaatggcttaaactgatttaaatacacttcttcatttccactctgtaagtctgaattagggagtgtgtgtaaggacactgttgcactaggcttttctggtgggaaacaggacctgtgtctgatgggtctatcacagaagaaggagcacaggatgcctgctcctctttgggcctcctccatgagcctcagttgtgcatccttggacctgcacaacttgtgatctcagtccactctgatacccgagagccccatattacctacgatagtgggccctctgatatgccactcagacacattgctatatgtttggtacacataatcagaatactaagcatgccttctccacatggcaatacctctttgtaaagatagacaaaaagcatattaaaaataagcacaagaagtgttcagactgggtttacgggtagggtcatgcaatatactgcagaggtagggggaaaattcaaagcagtgttttccaaagtaaagaaattataaacagtaataaaggttcccaaagtaaccacatatcaaaaccaaaacacaaaatttggaactggattcatttgtaagtatatcaagattctttgatactgttgagattatatcaatcattttggtagcaatgttctatgctgatcaaaatcatttgaatggtagttcaaaaatctttaaatctgagaaaaatcaattagggtttattagataatctgaattcacggaatccacaggagaaaaaataatgcaaactattaatctgaactattttgtagaaatagctacaggttactttttttatttggggcagtaattacctgacgtcttaatgaagctgcatctaccacagtcatgtcatctgaagctccttcaatggctgcatctaggtttgaaatgccatacctagcagataagatattgaaacacaagttaaaactaagagtaactgtcgagtcatgtgttgtgttgtatactacttaaaagactcatacccaacaatataaattagcatttttccatttgaattcatacaaataaggaaaagcagcttaagatgactatctgcaatactgggaaagctgaggaaaaacctcttactatgtgctttttttcaagccagaaaatgcaacaatgataacgggccctgtctgaaagaggcagaactgctactatctgacatactgacacacagcaattatatatgaaccatgtccatatgtcgttctgtaggcagagactcaatggcaggaaatgcacagtaaactacaaacaaaaactgatcatttattactctttcacttctgcctttcttttactattttttttttactttacttctgatttctagttgtctctgctctcccacaaaagtgaatacatgatcttctaaatcttttgcaactacacttaactacagaactgtctcaataatataccaacaagaagctgcatataaaacagtactgctggaaaaccaccaagacaatgtagagaaagtacattcaatagtactttttgttaaaatgcactcactcttctaaaagggcacggactcaggaatatagtggcattttagagatgggagtcttacatgactggtctcaaacttgctatgtggcagtgcatggccatctactctcgatcctcctaccttagcaccccccacaccccgcacaagtgttgggattattagcatgtactaccaagcctgcatgcagacataaaaatttaaaaagaaaaacagagaaatgttctgtcttccatttgtctaggtttctacatttttaagaaaagaacctgaaacgttatgtgtctgtgagtgtgtatctcagtgtattctacacttgtcaacaggaagccaggaaagtgcactagattaagagctgctcacatggtgttgaacttgagaactgtggatgagccataagaagtcttaactgctaagccatctctccagcaccaggtttctacattttaaaattcattttaatgaagaacacttttacctagatatagtttatacataatacaatttatttacacgtatatctactttatgttttatatggttattttagtgaaatgacatggtaacctttctacatgagcagaatgtaaataaaattccttttatgtaagctacacagggttggtacatgaatcatcattctaatactcccagtaactccacattagaaaacctacataacctgacataaagggatatgaaggagaatatatactccctcacgcttgctaatatgctgattcacaaagttctactgtttcaaatgttaaaactacctcaaaacacttttaaaaagcatgtcaagtagactttaaatactagagggcatgtacccattgtagataatccacagcaatctctgacttgcagtttctattatggctaggtcagatggcttacactaaccatgccttcctcttaagaaacaatgtgtcttgaactactcaaaataaaatttataagttaggagaaataaactcagttcataagtaaatgctggaactgtgagtttgtaaaccgagcaaattactcttataaacactaaaatagaacgtttaggtctaagggtgtagctcagtggcagaacgcttgcttacctgtgcaagtccctgggtttgtcccctgaaccataataattcagcctgcactccaaattattaaatgtttagtgaggaaactatgggtcaatgcattttcttttctatgttttatcttcaaaataataaacaatttctactttcccaagattacacatgagatgaatagttggaggaaggggttatcaaagaataccagcaattgcctcaaaggtaaacggaaggctggtgtgatactcagccagaaaatgctttccgtccaaagctgagcacctaaatttaatccccagaatccatgttaaaaatagaaaagctgggcatgctggagcattcttgtaatcccagtactggggaggcagagacaggaggattcctgtggcttgctgacaagccgacttagtgcaaccagcaagttccaggcaaagtgagagatgtctcaaaaaccaaggtggctaacactggaggactatcaaggataactattgggttttcatgtatatgcacttgtacccacacaggcaaccccaccccatcccatcatatacaaaagtaaaggaacagggatgatcatacacaccaacacacaaacatgcacagagataactagctttaacaaagaaataaagcatacatgaaaaaaattaccatttaaatactgaatcaccctgtttcaaaaacctaaagataatcttcacttgtcatatacatatgacaagattttatcatcaatttaaaacaaaaaatatgaaattagtttaaaaaatttctatttctcagaactaaaaactcttacaaatgctatcatatcactacaaacacattcacagtaagttaagagataaaaaaaaaaaaactcaagggaaactagtgtggactaaatgaagatgcagaagaaacgagtaagcagtgttcagggccaccaatgcaacatggataagattaacaagaaatgggtggctcccttttctcttacttaagaatgtgtctgcctcttctgaagaagagaaacaaggctgccaatttaaatcctgctgggacagttagcacaattctctaagcatatctgatagtatgaaaagggcaaatacaagagcaaaggctcaaatcaacaggtgataaaaaaatagttaatggacataaacaagatttaagactctatactttgttttagcatgatcctctataaagctactaaaatactgctataaagtatactggatgctcttaccacaccacagcagttttgttttgttttttttttttttttttggggtggggtggggtggggtggggtgtattgagacggggtagctctggctagtctggaactcactatgtagatcaggctggcttcaaaaatcttagcgatccacctgtttctgtctcttcagtgctaggattaaagtcatgtgccacaatacccaagcataatttttattattatacaatgttctcatactttggtggatttatgtcaggactaattatcatccctgttcttagcaaagcacatcatttcttctaagggaaagctacagaggcctaagtcgtatacataaatataatcacggctatgacatgcatcatgatgtcctgcacaatacaagctccatcaagtctgcgtgttctttggtaatcaaagtctccaaagttacctgacgttgtcatgatgaggattagaagtggcggcagctgacccaccacgcaacacaggtctagggcaggtttttgcagaagacacaagacagaatcaggaaacagagaaatacgaaaataaagcaaaaacaagacaaataaatgtcagataggattatattgtatgctttagtacaatataatatccctcaaatgctttgaaaatccttattttcttatgtcttccccattttaaataattttaacacttcataattttaaaaagagagaaaaacatgacggaatagcaccaacatatctatatggtgctatttaaaaaatgtaattcctcttttccaattgaaaaataaaaccactagcaactttaacagcatatccagacctgttagtagcacctgcatgatcatggttgctcataaatataaactaggcatttaaaggaatacccactgcccacaatcccttccctctagcttcattaatctgattagtc

SEQ ID NO: 1675 - DNA, 1504 bp, Mus musculus
cagccaccctgaggaggtttctaactgaaccaggaaaaccatgacgtgctgtgaagggtggacatcctgcaatggcttcagcctgctcattctgatcctgctaggagtggttatcaattgtatacccctgggaatcagcttagtggaggcagactcgacttctcaaaaccccatctcctgctatgagtggtggtttccaggaattataggagcaggtctgatggccatcccagcaacaacaatgtccttggcagcaagaaaaagagcgtgctgcaacaataagactgggatgtttctttcatcactcttcagtgtgatcacagttgttggtgctgtgtattgcatgttggtatcactccaggctctcttggaaggacctctaatttgtaatactcaggccaacagtactgtcacttgtgaattttcattgaaaaacttaagtaaatttgatcctgaatccttcaatctgctgtggttcttcaatggcacttgtgtttctcctactgattttaaaaaccccaccatcaataacatggtcagtaactggaaaatacccaactccaactctgaagaagacagacacaggattttccacttctcagtatttatgagtctcctgcttgttggaatcctggagctcctgtttgggctcagtcagatactcattggtttccttggctgtctgtgtggcgtctctcagcgacggagtcaaattgtataaagggcaataaactagaatatcagtactttgaataatttgaaaattgcatttaaaatatatacttttgtaagttcaataatgaagcatcttctagaacacagagtcattttagtgcaaacagatgtttttagaatcatctctgaagcaactttcaaaaaaaaaattaacctatcaagctgggcagggctggtacaggccttcgatcccagcactcaggagcagaggctggaggattcagagtttgaggcctgcctagtttacaaatgccaagacagccaggactatacagagaagctaaagcagaggactggcatgaactcgcactagcgcgtcctgtatgtgcagtgcacctccactccggggggagaagttaccagtgggtgacacaggggagaagcataggaaagcttttaggtttcttttttcctatgtatgccaaaagaacaattgtccacctcatggttacagaagtatgtgtcttagttttaagaaatatatattatgtgttttgggaggaagaccatgttttaaaaatactttaccctcaaagccaaagtgatggaaaaatgctgtgtttaactgacaggcacatggcaattcatcatactctatttttttatgtttgtatctcttcatgatatctgctaagactttggggaaaaaaaatcagccttttagaagctggtttttatgtatgctgatctttaaaagataggtaacaaaatgtatttattgtattaaaatgttatgaaatagaaaaaactaaaaatctacaattttctg

SEQ ID NO: 1676 - protein, 228 aa, Mus musculus
TRKTMTCCEGWTSCNGFSLLILILLGVVINCIPLGISLVEADSTSQNPISCYEWWFPGIIGAGLMAIPATTMSLAARKRACCNNKTGMFLSSLFSVITVVGAVYCMLVSLQALLEGPLICNTQANSTVTCEFSLKNLSKFDPESFNLLWFFNGTCVSPTDFKNPTINNMVSNWKIPNSNSEEDRHRIFHFSVFMSLLLVGILLFGLSQILIGFLGCLCGVSQRRSQIV

SEQ ID NO: 1677 - DNA, 37262 bp, Homo sapiens
  misc_feature (1)...(37262): n = a, g ,c or t
aagtaacaaaattaaaagtatttttcacatccttaagagttaactttctttaaaaaaagtcttcaaaattttttaaaattcttgaaatttaaagacataattaaaaggcaaaattcaaattataaaaaatgaacatccaagttttaaataaaattatttaaagggaactgcaatatttattgacctttaaacatgtaagtgtatttaagaaagtatattatgaaagtaaaattattaacaagtctagtgtttcatgtccatttattgccaacataaagaatcagcctatttcatgcatgctatatcgagacctacatgtaaacaaacctaagaaaaatatgaattgtttcatggtgcaaacattgctcagtgacggcatgcaatttttgtaaataccacacgagcacgtcagtacctccaacaatggggcagaatgcaatgagcaagaaactggattcttgccactacttactggaaatattttattacacaagaatattgtttagtcatgctgagaagaaggatttgacaagttaacccatcttttctcttacttaggtattttccaacaaattcttgtcacactttgaaggaatcaatccacaaacctctatggcatggagaagctggcagcccttgttttgaggtcgtggggcaagagacacgaagaagcaggtccctgagcagtaccagtcccagctgcacatatttaggcttctgggctaagctctgggtcctgagtggtgggggtggattagggcttgcgttttttacatagatttttttttttgtacgcttgtgatatgtgggatactaaagtgcacgtcccagggctgggcctagatcttgcctagatctgaggttggtactgggtgcatgaaaaactcctgtgattattattattattattatcattattatatttgagacagagtctcattctgtcacccaggctggagtgcagtggtgcgatctcggctcactgcagtctccgcctcctgggttcaagtgattctcctgcctcagcctcctgagtagctgggactacaagcgtgcgtcaccatgcccagctaaatttttgtatttttagtagagacggagtttcaccatgttagtcaggatggtctcgatctcctgactttgtgatccacccgccttggcctcccaaagtgctgggattacaggcgtgagccaccgcacctgttcactcctgtgattattgaagaatcaccaacggtggagacctccctctgtgaaggagggcccgtggcacctcggccacagctctaaaatagggctcaaggcatgacattgaaactacttgttgctcctacttgattttacttgattttacttgatgagtcctctctactgacaccatgggttgctgtggttgtggaggttgtggtggttgtggtggctgcggtggtggctgtggtggtggctgtggcagatgcaccacctgcaggtgctaccgggtgggctgctgctccagctgctgcccctgctgccgtggctgctgtggaggctgctgcagcactcccgtgatctgctgctgccgccgcacctgcagctcgtgtggctacagctgtgggaagggctgttgccagcagaagtgctgctgccagaagcaatgctgttgctaggagggaccccagcctctgggcaggtgccctttcttgggcttggatttgtagactttgtatactttcatcacctctggttcacctaaatattgagtagtggtggccaggcgccgtggctcacgcctgtaattccagcgttctaggaggccgaggcaggtggatcatttgagatcaggagttcgagaccagcctggacaacatgatgaaaccctgtctctactaaaaatactaaaattggccaggcctggtggtgaatgcctgtagtcccagctactctggaggctgaggcaggagaatcacttgaacccaggaagcggaggttgcaatgagctgagatctcaccattgcactccagcctgggcaacaagagtgaaactccatctcaaagaaaaaaatacatatatataataaatatatattttatatatatatatatatagagagagagagagagagagagagagcaagagagagcagcatgtgatttcatataaatacacctgatttagaagtcacaagcccaaattcaagtccatgctctgccacagcagtcagccacaaacaagtcagtcagcctcccagagtcttgcttattcacctataaactaataagtttgaactaagaattagtaaggagcttttcagttttaacaacatgtaaatctattgagatctattgagttcgcagaactaaactcacaggctctccagcctcacgctctgaagatttctcttatgtatcttatgcttttacatatatatacctttgctatagtgggcattaaaatttgttaacacgaaaaatcacctttaatctcatatgattcatcagttataatctgcactgcaacaaaaacaggccgtagcttacctgatgaaagttcaaaagtttacattcatgagctcagtggaatgaaataacgattactaatatattccattctttcaaaacatttactaaatgtggaaattctgtgcttatttacctgcttatattcgttgtatactatatattggctacagcttctagtgttcccttatcttcctaaatataatttaataaaacactagaaaaatattgtatttcactgtgtttgttttgatttgtttttgtcttttttgagggaggggtgagagtgatgaagctgatgtttggcaacacatattgcaaactttaggaaggttgtaagatgaaagacaagggatattcggaatttattagggtaatattagctacaacgaagcttttcttgttgctgtcaactatcctgggcagttttaggtgggcaggaggggatgaggattcgggcagctattcttcactcagttatttagggatctaggctgaagacagcactggcattttcaagatatggcttctaagatggcttagtgcgtccccagtctataggtagaaaagaaaagaacagatagcccaacacttcttaagcgctgtggcttgacagtgacacagcttgtcattggttagaagtaaccacatggtcctggccagggttggtggctcatgcctgtaatcccagcactttgggaggcggaggtgggtggatcacctgaggtcaggagttcgagcccagcttggccaacctggagaacccccatctctactaaaaaataaaaaggaattagctgggcatggtggcacgtgcctgcaaccccagctactcaggaggctgaggcaggagaattgcttgaacccgggaggcagaggttgcagtgagtcaagattgtgccactgcactccagcctgggtgacagagtgagactctgtctcaaaaaaaaaaaaaaaaaaaaaaggaagtaatcacagtaatcacatggtcttgtccagtccatagctagactgacacttccccagcaacaaccttgtcatatgaaaaggaaaagcatacatttctcatggacagttagctgtgtctaccatataaagctcacgttctagtaaaactcctagctgatttgactgcagtgtgtttagaaggggataccctgaggtaactctggtgggtgtttaattcccatttgtatcacatgaatttcccctggaagtagtgaaactggtccctgcagtagatcattcttcaaagaaaagttttttttttttttttttctttttgagatagcatctcactctgtcacccaggttggagtgcagtagtgtgattacggctcactgcaacttccgcttcccaggctcaagcaatcctcccacctcagcctctcgagtagctgggaccacagatgtgtgctaccatgcttggcttattttttgtatttttttgtagaaacagggtctcaccacattgcccaggctggtctcaaactcctgggctcaagtgattcacctgtctgggcctcccaaagtgctgggtttacaggcgtgagccaccgtgccaaacacaagtttttctaataccattaacactgttctcatttgaattaactaggtagttttgatttgttgtttaaaatgttgcatgtcattctagagttacaagcacaaacatggttcagattcttataaaaggatctagatattctagagaaagtttcctccgtaccatttaaatgagatcatagtggtggctatggtgaactctcttgctcaatagccatttccatgtccctctagtatttgctttttttccatatagcagaggctgagatgattagaaattacatggcacagaattctctgcatctgggatctggatattgcaagaattagatcaacccctgaggggtataaaaggcagaaatgaggtgaaggtcattttcctccaccttttatctgttgttgctgataaggaagattagggtggaggagttgagttttctgcactgcagcaatgttcctgggtccagatagcgtcatgcaagttaataaccagttgcagaggcagctgtagtcagctgggcacccaccaccccacccaaccaatttttgtattagctgggcgtgttggcaggtgcctataatcccagctacttgagaggctgaggcaggagaatcacttcagcccaggaggcggaggtaaattcagtgttgtagcattcaatcactaacccggggtgtgcagagtggtgatgacaacagcggcaatggttcctggaccgcagccgtactggggtgtttgtgaacttaatcgttccagagtggcttcttgatgtccccgccttttttcttgacagagtctcgctctcgttgcccaggctggagtgcagtggcgtgatcttggctcactgcaacctccgcctcccaggttcaagtgattctcctgcctcagactcccaagcagctgggattacaggcgtctgcaatcacacccggccaatttttgtatttttaatagagacggggtttcaccatgttggccaggctggtctcaaactcctaacctcaggtgatccaccccaccttggcctcccaaagtgctgggattacaggcttgagccacagtgcccagccttccctgcctttttggctactgcagagacagcggcatctcccgggccagttcagcagtcgggacctgcgaagcatttctgcagataagtctagaggctgcttttctagcccttccagcaattttgtacacatgattctcccattacatctcttcccaattccatagctagaatttcagttttctgcaactaactgacactagtctatgaaacgcccttctatcttttataccaaattctagccacgctccaaagctgtgtggaatcctggctcccagcccttcttgatggaatcttcctttttctgaactccaaggcttttgctgttttggcacgccatgtgacaagttatttgcatacttttccatccttggttttagcaacttttagttttagctcttttggttgcagaaaaatagaaacccactaaaaacaatatgaaaggataataatatagaggcatctcatagaaaacaaagacagagtctgcagtcagttttcatagggtagaaattaagacgtaaaatgccattgagaaaccaagcagtcaccctttctctaccaccctctaaagctgtgtggtctcctacctcctcttcctgcatatttctcctctctgtctctcctcctccttctgtttgtatagattggtttctctgtttctcccagcagcgttcatgaattcattgtattgtattgtatttttattatttttatttatttttctttttctacagaagggtctcactctgtcgttcaggctggagtgcagtggcatgatcatagctcactacaacctccaacttctgggctcaagcaatccttccgcctcagcctcttgagtaggtggggatttaggtatgtgccaccatacctggctaaatatttttgtggacatggggtctccaggctggtctcaaactcctcacctcagatgattctctcacctcaacctcccaaatcactgccattacaggcataagccaccgtgcctggccgttatttttattttttgtagggatggggtcttgctatgttgccctagctggtcttgaattcctggccccaagcactcctcccacctcagcctcccaagtagctgggattataggtgtgagccaccaagcctggttaagctcatgaatttaaatatggtagagacttctagttgcctacccaatacccttggtctcgttctccccagttttaactgggcacagatcacttggaataaatactacctttcccatgctgctacatggctacattctaggcaatgagatggctctttgaaagaaagagggtgagcctttctcttctttgatccttcttgttttatttattttttcttcttctcttcctttatccttctgagtggggagcagatataattgttggagctatggttgccacattttgaatgtgagaatgaagagatcagatgaagagatgcactgaaaggatctctgaggaagtggagctcccactccaactcttgagtactgtactagtctgttctcatgctgctaataaagacatacctgagactgggtaatttataaaggaaagaggtttaattgactcacagttccacaaggctggggaggtctcaggaaactttcaatcatggtggaagaggaagcaaacacattcttcttcacatggcagcagcaaggagaagaatgagcaaaagggggaaagccccttataaaaccatcagatcttgtgagaactcactcactatcaggagaacagcagcataggggtaaccacccccaagattcaattacctcccaccaggtccctcccacgacacgtgaggatcatgggaactataattcaagatgaaatttgggtggggacatgtccaaaccacatcaagtacttatcatctgactttgtgaataactttctatcttaagccatttttattttaaatttctttttgtgtgcaactaagcttaatcttaacagatacacatgccctcccatttcatgcatactggggaataactaatttctcttggtttcaattccaagctcctagagagattggaagagcatagcttctgtatctaccagtattccgatcaacaatggccaggggagcaaagttccataacacaaatggaatacagaggatctatgcatgtaagttacggggggttgtttttacagaaacaggcatgtgtgttgggcagatactaaaaagtggtcatcattctcctcttcagttataagctaattctcttttcagctttatactgaaatatcttccccttcatcacatacagattaaatttctacatttttacagaattcttcagatacttccttttagccacaaatgtaaggagtaccaaacccgagtggaactatgttatgcccactagcaaaagcatgcagcttactcagttttggtcaaatggcaaagactctggaaatcagacacttgattctcacagtcaggtggagtccaaccgatccagttccctacatataaaatgattccctaaacagttcttcaattcaacatcttatgaagacagcaaaaagatttgaaatggcacaacccacattctaaggtaagtaactaccacctcccactcattcaagtcagtaataaatatataatttatgtattgtaatatatagttatagaatgagataatttatatgacttagtgggagggtaaattttagttattaatttttataaaataaaaaatatatttttttagaatattatataattatagtagaaatctcaaccatgcagaagtatataaaccatacaatggaagtgtctcctgtctctcaacccagttgtattctttcagttattctcggtgttttgtgtgttgtgttgataggtgggtgttttttgtttttgttttaagatggagtctcactctcttgcccaggctggagttcagtggtgtgatcttggctcactgcaactactgccttctgggttcaagtgattctcctgcctcagtctcctgagtagctgggattacaagcacctgccaccacacccagctaatttttttgtatttttagtagagacagggttttgccatattggccaggctggtctcgaactcctgggctcaagtgatcctcccacctcgccctcccaaagtgctgggattacaggggtgagccaccatgcccagccaataggtgggttatttttaatccttttatacaaatcctttcatacaaaggatttcacatttcactgaggtccagtaactggaccccctagtctggagctactgttttggtgtccattaccagggatgccccttgtaccaggctgtgtgcgccccccacactgctgcagggtggagcgctgctctctaagcctactacgcctgagcttttggcccacactgactgcaccgctgcatacattatttcaccattcccaacagcactcactgaatctatgctcctgggctgagcgggggattacacagaagcagaaggaaggcgctgtagagattagagctgcctaatgtcccaatcttttctcctagacatattggtttgtatttccacccacttgaactcatgcataactgagtgacttttttggccaatgaaatgtgaacagaagtgatgtgggtcgcttctgggcagaaacatatagatccagtatgtggctcaccacatttttgtaccctgcctctgtgactgtggaagcctggatcaagaagctgcctctgccagtctaggtctaggtctaagtctaggtctttcagtaactaccatgaccccatttagatcaggatggtcagtcagcataagcaagaacttttgtattgtttttgttttttgagatggagtctccctctgtcgcccaggctggggtgcagtggtgcaatctcagctcatggcaacctccaccccccaggttcaagtgattctctggcctcagcctcccaagtagctgggatcacaggtatgtgccaccacgcttggctactttttgtttttttagtacagatgagggttttgccatgttggccagactgatctcgaactcctgacctcaggtgatcctctcgctttggcctcccaaagcactgagattacaggcgtgagccaccgcagctggccagaacttttgtattttaaagcttatgccaactgatagtcttttctcaaggagctcaccagctagtggagaggcaatgtggaaccacagtctagagatgtaaagtactgcacatggccaagtaagtgttcaagggcttaaataaaatatgataatctcctcatccaatctctctcctattgctatctttcagtctggtagcattagccaaagctctcacatgtcttaggtgggctatctctaaatgggttagtctgcaacactggaataatatgacataaacattttcttttgtgtatgtgagcatacggcttgaaataaactctaatatttgcagcagaggaaatacctttctccacatctcatatgtgttcattttcttgttgaacaatttcaaaataagaaacttccatagctggtaataatatcgatagaacaggaaaatatagtttagctggatatttttgtttttactttttagaagccatactaataaaggagtatattaaaggagcttatcgtaagcctatcttcttacataaatttatctcatagatttttttttctgctttccttccttcacctcatcataatatggaattattttctcatttcccatcatagtcatcataataatgtcctaccctattggactctgaactattttccactattcattttttattagcgttaaattttaaccagaagattgggataaaaggcaacatagtaccatgcaagcatagccactttgacaacgtttctgagccaggggtgaccatgacctgctgcgaaggatggacatcctgcaatggattcagcctgctggttctactgctgttaggagtagttctcaatgcgatacctctaattgtcagcttagttgaggaagaccaattttctcaaaaccccatctcttgctttgagtggtggttcccaggaattataggagcaggtctgatggtgagtgatatttatttgacttgatgtgaagaagggcctgcctatttcaccaaaatcctaaaagctgtcttccagtcttgcagttaactatgtcttggcttatgataaaatttggagcagtagtatggcattaatttatattggtcatcagtgaagaatggtaatttaaataaagtacactatgtggtataggatagagagctgggcaaaaaaataaattaattagtagaagttggctgggttattatctctcacatttctgtacaggtagggctgctctttcaagctttgtggttagagttagggaccttctgaattaattccttcaactttccattgctccataccagtctctaagtatttacagaaaatgcaataggagtgacaggttgcttaatagggatgagtagaaacattcccatgtatgatgactagcctgggtgatggtaattacgaggcatgaatgctgcattgcctgtacctgaagggagttgggctaagagacatggacttaaaatcctgggtctctggcctcaaggaatttttgactcagctattatatagatcctaggacatcgagcttgttgaatagtttggtgattgttactaggtctacctctgttgaaatctgcagcagagcagtgcaggatggaactcctaaatataactgacatgaatcacccgaggcacttgcaatagttagatttacggattttctcctgagaattctgggtgcagtaggcctgggtaggacgcatttgtatagggaaaacggctttcaaatatggcagaatacctcagctatggttctgcctcccatataccactgcaagcaaatcatttatcctatggttttgtttccatatgtgtaaaatggggatgtggatgttgaagttgataattcagcatccaagaggcttgtttttgtttgttatgccactagggggtttagttagtgccaaataaatgaatgtgtgtgtgtgcctgtgtgtgtgtgtgtgtaagacagagagagagagagagagtaagctgtaaggactgatattatcagtgttttagagataataaaacacggaggtgacttttttttaacttttttttttaagttttcagttcagaggtacatgtgcaggtttgttacataggtaaacgtgtatcttgggggctggttgtacagattatttcgtcatccagatattaagcctactacccattatttattttgcctgatcctctccctcctcccaccctccactctccaccctccaacaggcaccagtgtgtgttgttcccttttatgtgctcatgtgttctcatcatttacctcccgcttacaagtgagaacatgcggtttttggttttctgttcatgcgttagtttaaggataatggcctccagctccatccatgtccctgcaaaggtcatgatctcattccttttttatggctgtggaggtgatttttaaagaaattcaggacatagttttctacttgaatcactgattctgaattatgatcagttactgctgctggtattatccccagatttacaaaaacactcttcctttaccatcacaaagaatctgttcctctgctttaggtagaaagatctaattaaagaaaaagcttttggaaagttttgggctatttcttcacactgccatgaatgctctcttccaggctgagagacagaaaacacattgcaactcaacagcatgaagcaactgtacatccgtgtgtctgttttcttccctgtagaaggcttctctctgcttgagtagtagaagcctcttttgcatttgcttacaccagaagccaggagcagctggctgagcatgacttaacgatagcaatttccatgaagctcctagaagttcctgagttaagacaatccacttagaataacacatgcagctttagatataaattggctctgccacaaatcccatgagattaaaaaaaatgtattagcattaaaggagtcggaggtggcgatgacacatacctacatctcctgtattcttcattttaggatggtggcgggtgtggcagggagagaagagaaagagaaaggcagagacagacagaaggacataagtgctcatttattggccgtctgccaaaggccagctactgggttcatacattaccttgttatctcatttagtctctataataatgtgtgcatttattatcacttgaattttataggccagcagatagaaagttaggaatgttaacaaggtcacctaatggatgtgaaattccagatttatctgacgtcaaaactctgtttttccaccagtgctagtaccgtagtcctcaacacctgtctcagggctgccagaggtgaaagatataatctataaattaatccataaagtcaagtgaccaggaaactgagtcacagaaagattatagaaactcgtggaacagtttcagagaatctgaacttcctcgttctacagctaagtttactttatcaccctcagtaagtattatcaaagatataaacaccagactatctctattattctgtattatagaatgtcattaaagcatcagacaactctttgaaaagtccaatatgaactttatagacagaggctatgcccacaagcaaacaggtgggtggtaaaaagggctcagactacaggtatattttcatgatcctcagatagatagagaatgtggaagaaagtgtttttcaaaggaatttattaatatgtcctttataatatccatgaaaatactcactagttcaaaatactgagctttcaatatactagtaactacacaaaaaagttaatagagaagaaatcactgcctgtgataagcactttggtcatagttcttgaaatctttccagaattactgtagtgtttcaaattagtattgttaccaaaaatgggattttgcaggaagtagataattatacaaactatggaattcattattgattacatcatgaaatatattcattttatggcttcatgacttacttaaaacggaggcggacttttcatcttctaaaaccatgactaagtaaaaatgtgatgtacttaattatctttaactttaaatggaaaaatcaatacaaatgttatttgttcgagtatttttnnnnnnnnnnnnnnnnnnnnnnnnnnnnnnnnnnnnnnnnnnnnnnnnnnnnnnnnnnnnnnnnnnnnnnnnnnnnnnnnnnnnnnnnnnnnnnnnnnnnnnnnnnnnnnnnnnnnnnnnnnnnnnnnnnnnnnnnnnnnnnnnnnnnnnnnnnnnnnnnnnnnnnnnnnnnnnnnnnnnnnnnnnnnnnnnnnnnnnnnnnnnnnnnnnnnnnnnnnnnnnnnnnnnnnnnnnnnnnnnnnnnnnnnnnnnnnnnnnnnnnnnnnnnnnnnnnnnnnnnnnnnnnnnnnnnnnnnnnnnnnnnnnnnnnnnnnnnnnnnnnnnnnnnnnnnnnnnnnnnnnnnnnnnnnnnnnnnnnnnnnnnnnnnnnnnnnnnnnnnnnnnnnnnnnnnnnnnnnnnnnnnnnnnnnnnnnnnnnnnnnnnnnnnnnnnnnnnnnnnnnnnnnnnnnnnnnnnnnnnnnnnnnnnnnnnnnnnnnnnnnnnnnnnnnnnnnnnnnnnnnnnnnnnnnnnnnnnnnnnnnnnnnnnnnnnnnnnnnnnnnnnnnnnnnnnnnnnnnnnnnnnnnnnnnnnnnnnnnnnnnnnnnnnnnnnnnnnnnnnnnnnnnnnnnnnnnnnnnnnnnnnnnnnnnnnnnnnnnnnnnnnnnnnnnnnnnnnnnnnnnnnnnnnnnnnnnnnnnnnnnnnnnnnnnnnnnnnnnnnnnnnnnnnnnnnnnnnnnnnnnnnnnnnnnnnnnnnnnnnnnnnnnnnnnnnnnnnnnnnnnnnnnnnnnnnnnnnnnnnnnnnnnnnnnnnnnnnnnnnnnnnnnnnnnnnnnnnnnnnnngcatggtggtgcatgcctgtaatcccagctactcgggaggctgaggcaggagaatcacttgtacccagaggcaggagttgcagagagccgagattgtgccactgcactccagcctaggtgacagagtgagactctgtctcaaaattttttttttttttttttgtagatagggtctcactatattgcccaggttggggtcaaactcctgggttcaagcaagcctcctgtcttggcctcccgaagtgccagaattacaggcatgagccaccatgcctggctgcaaaatatagttttgatatttgtaatgagctatgactttgtgtgttactctcatgttcaagttcttagaggactcccaaaagtctgaatttcatcacaggatttttaatggtctgaagtttttccacacttcatttgtaaaatcatgtaacttctcaaactaaatacaattagggggctctgtaagaaaaaatcaacaatattactttcctttttaaaaacaaaagactagcaagacttttaattttacaaaaactcaggcattcaaatatgcttaggaaatgaagagaaagtgtgttctcataattactcattttggcaggagattatctggaaaatttatatataattcatacacacacacacacacaccattcacagttttagtgtctgtctaaagagcccctccaatttccggagctctgaatgggaaagcggttgaaaccgcagcgagttgtcaaatcaccagtaacagcattacaaagatgtgttaatacgccttgaagtcggtggggtggtgacttatacactgtaagtaattgtccctttataaaacccctttgtaagtgaatcatgaaaggaaatatttagtaactctgaaataaacttatcttcaagaaagttaccagagttcagtttgcatcaacaaggaaaatagaacaatttatccatttaagttgtaatgtcaatccacttttttttttttttttttttttttttagacagggtctcactttgtcatctaggctggagtacacttgcactttcttttaaaagaatcattaattttctaaatctgtagctggcaaactgtaaatattcagccaatattttaggtttataaaccagcctcttccacatattttttttttttttttttgagacggagtctcgctctgtcaccaggctggagtgcagtggcgcgatctcggctcactgcaacctctgcctcccgcgttcaagcgagtcctctgcctcaggctccctggtagctgggactacaggcacgtgccaccaagcccggctaattttttgtattttagtagagatggggtttcaccatgttggccaggatggtctcgatctcctgatctcgtgacccgcccaccttggcttcctgaagtgctgggattacagacgtgagccaccgcgcccggcctcttccacacaatttaactctactcttggtgcacaaaagtagccatagacaatatgtaaatacatggatgtgactgtgttccaataaaactttatttacaagaaagaggtggtgggccatagtttgccagttcccgttctaaatgatttgtcctgtaagctcaaaaggcagtacagcttatgtgtacaataaaagatgtttagtgcacgaatactgatacctatttgggagctaaaatttcttttcccttttcttctgggctttcagctatgcgccaaggtggctaggcagccatatacacatgtggcctctaaataaggagggtggtggtgttcaaggcaatgtgtaagcaaagcttgataataatacaaagtgacatggaggcagtacatcatcagatggagtgaggtttgttaggaaagctgccttgtaaagaggcataaactttaaacccgtgctaaaagaataaaggcagatgtggccttggataaatgaatcagagtgggagtaactggaaggacaatgagatgggcaagggtgaaggcagcagggaagatgagaatgaacaaactctaggtaggaataggggagaattgtaagacttgagtcagtgtggaatagggattaagagtcccggctgagcacagaggctcacctgtaatctcaatgctttaggaggccgaggcgatcacttgagcccaggagttcgagaccagcctgggcaacatggcaaaatccccgtctctacaaaaaaatgccccccagaataaattaaaactaacagggcgtgatggcatgcatctgtagtcccaacgactcgggaggctgaggtgggaggatcacttgagccctgggtgttgaggctgcagtgaaccgtgatcatgccaccgcacttcagcctgggtgacagagtgagaccctgtctcaaaaaaacaaaacaaaacaaaaaactatgtgggctctgcaccccaaatgactagctttttttgttgttgttgtttgtttttttgagatagagtctcgctctgtcgccaggccggagtgcagtcacgtgatctcagctaactgcaacctctgtctcccaggttcaagtaattctgcctcagcttcctgagtagctggggctacaggtgtgcaccacctcgcccagctaatttttgtatttttagtagagacggggtttcctcatgttggccaggctggtctcgatctcctgacctcgtgatccacccacctcggcctcctaaagtgctgggattacagacatgagccaccgcgcccggccaaatgactagttttgaatcccaacccttctaccaagaaagtagaaggacaatttgagtaatttgtcctttctatgcctcagttttctcattggtaaaatgggaataataatagcacctacctcataggattattatgaggatggaataaactaaggcgtgtaaagtgcctgtaacagagtctggcattcgccagagctcgggaaaatgttagagaatgagagtagaaggagagagaaaaaccactcaagggcagctgtgctgagatggcaaaaaaacctacgcctaaaatttctcaagcggaaggaaataattacattccacccttcaatgatacaaaactccttccagtaagaatttctagtcgtagctgctgcctagatatactaaaaattgaaacccaagtcctgagaatatggtgttctttcttacagctttccttggcaacgtgtatttccctgaaggcagaatgcgatctatagatttctgagcatcaatatataaagtgagatcattacatatcatggatataggaagagaaaggagaacgtggaaccaaaaataattctcaaatataagtttggggaaaccagcaagatagccgggatcctgggaaaagaaaggctagtgggagtgggtggtgacagaatgatttgttcccaactgccaggcaaacaaaaccatcaatttcttttctgcaggtttgccagaataatccatacaatttctgggaaatcgggccaggcgtaatggctcacatctttagttttcttggcaggaggttttcttgaggccaggagttcaggaccagtctgggcaacagagtgagatcttgcttctacaaaaatatttttaaaattagccaggtgtggtggtctacacctgtggtcctagctactcaggaggctaaggcaggaggattatttgagcccaggagttcaaggctacagtgagctatgctcgtatcactgcactatggcctgggtaagagagtgagacccctactctttaaacaaacaaacaacagagtttggatgatgcagccaattctttcagaaacatttcttccaaaaataatgtataaataagtcatcctaatctatttaaaatccaattctctgcagatgactcagagtgaactaagaatgtagatagaagacttcaaaactcctgtcttgaattcccctgttcccgccgccacttttaatctttctggttgaaactgggatgacaaggttcacaaaaccacggatattgccaaattccctttttgttctttgagccttgatttcccacaactggtggtaaacggaaggtgaagattactattttttcttctgatgagaagttataatactcatctttcctgttgatgtcatttccaggccattccagcaacaacaatgtccttgacagcaagaaaaagagcgtgctgcaacaacagaactggagtaagtatgaagcagtcggcgtggaagcagaagtgcatgaacagttattgctacctaagcaaagccacactgagtcactcgcatctaccgaatcacagtggggctccactgacagagccacagccttagaaacatgctatttttatttatttatttagagacagggtcttgctctgttgctgagactggagtgcagtggtgcgatctcggttcactgaaacttctgcctcccgggatcaagcaattctcctgcctcagcctcctgaatagctgggactacaggtgcacaccatcacgcccagctaatttttgtatttttagtagagatgggggtttcaacatgttggtcaggctggtctcaaactcctgacctcgagtgatctgctcgcctcggcctcccaaagtgctgggattacaggtttgagccactgcgcctggcctgaaacatgctatttaggatgattatatagaagtagaaaaagtgagacgggtttttttgtcccacaaacatttagagttggccttctgtcccttcctcagtcttccgtggattgtcctttcctcaatctaaaggttttcaaagaaaggagattggtaagtcacgcccacagctgcaatcaatttcataatactcgggtgtgatatttttgtggcgtatataaaatactcagggaaaatgtactcagttctctcatgcaatgacagactggtttgctaggattagaatgacaattgcctttatccagttaaattaaaggagctgccaggtttttttcccccaaaacatttaatgcctacccactatgtataaagtcgtaacgaagttaaaagtaaattaagattcattaaccggagtgtcactctgctcagaacactttcagagatgctgtttcatttaattactactcaaaacccttaagtgggaaaaagtaagaagtgtgtttgattgacgaaggaaggacgtcagagaaagtannnnnnnnnnnnnnnnnnnnnnnnnnnnnnnnnnnnnnnnnnnnnnnnnnnnnnnnnnnnnnnnnnnnnnnnnnnnnnnnnnnnnnnnnnnnnnnnnnnnnnnnnnnnnnnnnnnnnnnnnnnnnnnnnnnnnnnnnnnnnnnnnnnnnnnnnnnnnnnnnnnnnnnnnnnnnnnnnnnnnnnnnnnnnnnnnnnnnnnnnnnnnnnnnnnnnnnnnnnnnnnnnnnnnnnnnnnnnnnnnnnnnnnnnnnnnnnnnnnnnnnnnnnnnnnnnnnnnnnnnnnnnnnnnnnnnnnnnnnnnnnnnnnnnnnnnnnnnnnnnnnnnnnnnnnnnnnnnnnnnnnnnnnnnnnnnnnnnnnnnnnnnnnnnnnnnnnnnnnnnnnnnnnnnnnnnnnnnnnnnnnnnnnnnnnnnnnnnnnnnnnnnnnnnnnnnnnnnnnnnnnnnnnnnnnnnnnnnnnnnnnnnnnnnnnnnnnnnnnnnnnnnnnnnnnnnnnnnnnnnnnnnnnnnnnnnnnnnnnnnnnnnnnnnnnnnnnnnnnnnnnnnnnnnnnnnnnnnnnnnnnnnnnnnnnnnnnnnnnnnnnnnnnnnnnnnnnnnnnnnnnnnnnnnnnnnnnnnnnnnnnnnnnnnnnnnnnnnnnnnnnnnnnnnnnnnnnnnnnnnnnnnnnnnnnnnnnnnnnnnnnnnnnnnnnnnnnnnnnnnnnnnnnnnnnnnnnnnnnnnnnnnnnnnnnnnnnnnnnnnnnnnnnnnnnnnnnnnnnnnnnnnnnnnnnnnnnnnnnnnnnnnnnnnnnnnnnnnnnnnnnnnnnnnnnnnnnnnnnnnnnnnnnnnnnnnnnnnnnnnnnnnnnnnnnnnnnnnnnnnnnnnnnnnnnnnnnnnnnnnnnnnnnnnnnnnnnnnnnnnnnnnnnnnnnnnnnnnnnnnnnnnnnnnnnnnnnnnnnnnnnnnnnnnnnnnnnnnnnnnnnnnnnnnnnnnnnnnnnnnnnnnnnnnnnnnnnnnnnnnnnnnnnnnnnnnnnnnnnnnnnnnnnnnnnnnnnnnnnnnnnnnnnnnnnnnnnnnnnnnnnnnnnnnnnnnnnnnnnnnnnnnnnnnnnnnnnnnnnnnnnnnnnnnnnnnnnnnnnnnnnnnnnnnnnnnnnnnnnnnnnnnnnnnnnnnnnnnnnnnnnnnnnnnnnnnnnnnnnnnnnnnnnnnnnnnnnnnnnnnnnnnnnnnnnnnnnnnnnnnnnnnnnnnnnnnnnnnnnnnnnnnnnnnnnnnnnnnnnnnnnnnnnnnnnnnnnnnnnnnnnnnnnnnnnnnnnnnnnnnnnnnnnnnnnnnnnnnnnnnnnnnnnnnnnnnnnnnnnnnnnnnnnnnnnnnnnnnnnnnnnnnnnnnnnnnnnnnnnnnnnnnnnnnnnnnnnnnnnnnnnnnnnnnnnnnnnnnnnnnnnnnnnnnnnnnnnnnnnnnnnnnnnnnnnnnnnnnnnnnnnnnnnnnnnnnnnnnnnnnnnnnnnnnnnnnnnnnnnnnnnnnnnnnnnnnnnnnnnnnnnnnnnnnnnnnnnnnnnnnnnnnnnnnnnnnnnnnnnnnnnnnnnnnnnnnnnnnnnnnnnnnnnnnnnnnnnnnnnnnnnnnnnnnnnnnnnnnnnnnnnnnnnnnnnnnnnnnnnnnnnnnnnnnnnnnnnnnnnnnnnnnnnnnnnnnnnnnnnnnnnnnnnnnnnnnnnnnnnnnnnnnnnnnnnnnnnnnnnnnnnnnnnnnnnnnnnnnnnnnnnnnnnnnnnnnnnnnnnnnnnnnnnnnnnnnnnnnnnnnnnnnnnnnnnnnnnnnnnnnnnnnnnnnnnnnnnnnnnnnnnnnnnnnnnnnnnnnnnnnnnnnnnnnnnnnnnnnnnnnnnnnnnnnnnnnnnnnnnnnnnnnnnnnnnnnnnnnnnnnnnnnnnnnnnnnnnnnaaaaatacaaaaaattagccgggcgtggtggcgggtgcctgtagtcccagctactcaggaggctgaggcaggagaatggcgtgaacccgggaggcggagcttgcagtgagccgagatcatgccactgcactccagcctgggcgacacagcgagactccgtctccaaaaaaaaaaaaaaaaaaaaatagatggttaaaaataaacaccatggcacttcttgatgagtacatttaagtaactgcacaagtcacagtagcatggaagaatcaggatttgaagtagactccaaatccatcattctgaacttttggctggaagaagaatagtgattaaagtgtttcccagctgtgagagcctgacaagttttgtccatctccatgatacacagttttctcatctataaaatggaaataataatagtatgctacctcttgggattatgaaaagaattaaatgagatgatatatgtagagcacaacatccctcaacacaactctataggtagccaccttattctgcactcataaaaggcaggtctcaagaacacaacacacagaccctgtgggagctgcattatcccagcaaagaaaaaggaaaagcattccctcgcttcatttctgctgattttgaaataatcatcagtgactaacaacttcactgaaacaatacaaaagtttccttcttttttttttcttttagagatgggctcttactacgttgcccaggctagtctcgaactcctgggctcaagcaatctaccctccttggcctcccaaagtgctgggactacaggcatgagccactgtgcctggcctaagagcttatttttggaaaaacaaacacgaactttcattcagtttcctatgccaaattccatgccttcttctgctctcatgactgactcacgaaataaagatgtgtacaatctttctaacacagtggctctcaaccggcgggttattttacccacccacctccaccccaagaggatatttggcaatgcctggagacatttttggttgtcagaaccgggctggaggtggcaaggcgtcgggggatgatattggcatctagtgggtagagatgagtgatgttgctaaatatcctacactgcacaggaaaggccccacagcgaagtgtgcaaatgtcattggtgctgaggttgggaagtcctgttctaactctatgctgttgactgatcactgtgggatgctggccactggccacttaaagcatcagggccaaattcacttaaagcatcagggccaaacgcttgcgagccaagagaccagacatgaagataaacgtagttaagatccagtcaagattctatgaagtaggaagtacataaaacagggaggaactagatctcagtggtcagaagaaacagatgagactcaggaatatgaaagttgagattttccagagacagtgacaagccaaaccatctttttttttttttttttttttttttgacagagtcttgctctgtcacccagcaggagtgcaatggcacgatctcggatgactgcctcccgggttcaagcgattctcctgccttagcctcccaagtagctgggatcacaggcatccaccaccaagcctggctaagtttttgtatttttagtagagagggggttttgccatgttggccaggctggtcttgaactcctgacctcaggtgatccacccaccttggcctcccacagtgctgagattacaggtgtgagccaccatgcccagccccaaccatcttttattgagtgtaatcaaatagcagagactgccctctgcctttttgtatcattcacacctaataaactgtgatcttaagatccaggattttagggcgactggatttaaaaaagactgtatacgctcctgaagcttgaaacagatcaagaacatgtcataacatgtgcaaatggctctattttatttttcagatgtttctttcatcacttttcagtgtgatcacagtcattggtgctctgtattgcatgctgatatccatccaggctctcttaaaaggtcctctcatgtgtaattctccaagcaacagtaatgccaattgtgaattttcattgaaaaacatcaggtaagtaacttgattttcacaggcttactgtctcacacagttgaactagtttgattagattaatgcagtactggaacaatgccatgtttttatttgatgcaactgccgggacaaacggattcttaggaattttagtacattaacgccagttagcacaactccacatcaaaatggaggaatcattagatttacaatgctctaaaaggacttttagatattgtctaaaaggactagttgatctcaaatggcttatgcttgtctttcaaaaatctacagttacatatgtgtatgtatattaaaaaattatgcaaatatacaccagaaacttaactttcatccttggagaatggaaataggggattccctttatgagagtgaagagaacatttactttctacacttctgaactaattaaatttgtcaaccatgagcaaatattacatttacaatttaaaaaatttaataaaaacacaataaataaaatgcagagccttgcctgtaggcttaaatggaagagcaaccaatggattcatacagatatgctataaatatactgtatgcatgggaatgaatccaaattttaagtcatgtaataacaagtaatactggagagttacatgtacttaataagtggctcattttagtcttttaagtacatcattctgtgactgaatctagacacaatttgtaaaaactggaagaaaaaaactatctaatccattacctctctgtatagcctgctcagtttagcaaataaccagaatttacttttgtagttacatacaaaaaattttttctccttttcccttaccttgctacattaaaaaagaaagtccctcaaattttgtgtagcatatttgttttgaaccaaaacccaaggaaggccaggcacagcggctcacgcctgtaatcccagcactttgggagaccaaggcaggtggatcgcttgaggtcaggagtttgagatcagcctggtcaacatggtgaaactgcatcactactgaaaatacaaaaatgagccaggcgtggtggcacgcgcctctagtcccagctactcaggaggctgaggcgggagaattgctggaacccaggaggcggaggttgcagtgagccaagatcaagccactgcactccagtctgggtgacagagtgagactgtgtctcaaaaacaaagccaaggaaagtctccttactaatagacttgaagtaaagggttaaagatttctaccacagatgctatgcacattaaatccccagggaatgacaacagcccacaatgtaccaggcaccaggctacgctctgcagacaacagcgctcagatattctcagcctagttgcggagatgggctaggctagcaaagttacaagagagtgatccttggcttgctacacatttcacaaaacactcatattccatgtgctgaaaatactgttgttttcccaggttgaatgtcagttgctgatatccagcaatgcaaactccctaagaacattccattttactctacagtaaacaaacaaaaaatcatcttgagatagatgtattagggctaaaagtttctcattttccacagccccgttaagaacaggcacatcactttaatcagacatatttaatcagtaaaaactgtacatctggttgaagaacggacgccacgctgtagttctgcactaagaactgagctcatttaatgggggtggcggggggtaggggaggctccttagtttttatatctagcaagtagaagagtatctgaataaataaaataaataggttgaaccacgaaaaactgttgacattcaactatttctgacatcccaaaacagcagtttcataccgttcaacctaagagaagatgtaccatagagatgcttgttaaatgatgggctatataagtaataaaagttttgtaactagtagagtatatggacacatgctcagaaaccctgatctctgtcatttctgggcacgatatttcaaaagtacattcgtttcactcattcttttatgtgcacaatgctactttcctttggtcagggatatttctgaatatctgatttttatcttttgtttttcagtgacattcatccagaatccttcaacttgcagtggtttttcaatgactcttgtgcacctcctactggtttcaataaacccaccagtaacgacaccatggcgagtggctggagagcatctagtttccacttcgattctgaagaaaacaaacataggcttatccacttctcagtatttttaggtctattgcttgttggaattctggaggtcctgtttgggctcagtcagatagtcatcggtttccttggctgtctgtgtggagtctctaagcgaagaagtcaaattgtgtagtttaatgggaataaaatgtaagtatcagtagtttgaattaatttgagaagtacacttgttttcaaagtcatctttgagatgatttaaaaaatcaacccttcacgtagaaagcacgttgtaaatgcataacactctcatatcagtggttgatttgggaaaggtggagagaattttcaattagttttgtgttgtactattcaaattttttacctcttcactgtgtgtagagaaaggagaagggaaggaggatgagaaggaacggaagtcatcctgaaaataaaagtacaggactttttttttttttttttgagacagggtctcaaaaaaggctggagtacagtagtacagtggtgctatctcagcttactgcagcctcaacctcctgggctcaggtgattctcccatctcagcctccctagtagctgggactacaggtgcgtgccactatgccaagctaatttttgtatttttagtagagatgggggttttccatattgcccaggctggtcccgaactcacggactcaagtgatctgcctgcctcagcctcctaaagtgctgcaattacaggcatgagccatcgcgcctaaaggacaggacctttttattgtatttctttaaagaataaatacataacctgaatgcaatcaagtctttagatctaattctcagcttgcagggaacactaggacaaatccaaaaagtgggtcagcgggcacagaatggcccaattttcaacaggaaaatgttataaaagaaaaatatttttgagggaactgttatagattaagagaatagaggcatgtttcagctaaacacatgtaaactttgtcagagataattgggaggagtatgtagaagaatcggattattgttaattttggtaggtctgataatggttttatagtataaaggctgagtaccccttatccaaaatgattaagatcagaagtgttttggctttcacatttttttggattttggaattttgcctataataatgagacatcttggggatgggatgcaagtctaaccacaaaattcatttatgtctcatacacactttgaacacctggcctgaaggtaatttcacacaatattttaaataactttgtgcatgaaacacaattttgactgcattttgactgcaactcatcacatgaggtcaggtatggaattttccacttgtggtgttacgttactggctcaaaaagttttggatctcggagcattctggattttgaatttttggattagtgatgctcaacctgtatacagaaatgtcctcatttttaaaaaaagaaatgcatatttatatgttttaaaattacttcaaccaaaagcaacggggagatgtttactgttatatttaggtgacaggtacatggcaattcattataccctcctattttcctatgtttacattattcattaattaaaaaacaatacctagaaaaacccaagactttcaaaagctattttctatatgtgccaatctttaaaaaacaggataacaagggtatttatcacattaaaatgttgtaaaacagcaaagctaaaaatctaaaattttctgaatgttatttctatatttcaattgtttatgttcattgggcttaaggttccagaaataatttgcagtacctacattatagctgcctaaataaatttagtaacatcaagagcttataagccttttttctgaacatttactatataaaaacattcttcctacacccctacaaatacttacttgtccttaaggcctagcttaagtatctcctacttgaggaagccttcccagtgctcatgatccaataaaccaagtcagcacttacccaagcctctattatcattcctgtcataatgtaacatacatgtgtttgtacgtccatcactatagtattcaggagcacaggaaccatgttcatcagccctcacctcttcaggtccttagcaacgcctctcatttccccacctccagccccattcctacccccacctgccttatctctggcagcactctttatccttgacttcagcacaaataccactttttctgagaggctattcctaaacgtctaatgaaaactaggtttccctttactcttttaccatgctttcatttacagcatttatcacaatgatgattgcattttcctttgtgcttgcttcttaaatttcactgtcccccattagactataagctccaggggtacaggaacatgtttattccctcctggtataaagagtacttagtacagtgcctggtacaaagcagaaacattgcatttagttgaatgaattaatgaatcctatcttcagtactcagcttttagcgaagactcgatacttactcaatgaactgtcaaactgctaatggtcatgtaattaaaacaaaaataagacagctcactgtactctagtgaacaagggtcagcaatggtgcttacaaattttctcatcaccccccaaaatatttatgccatgtactttccccaaaatgtgacttcattaattcagccagtgaccagagtatccttacatcaatgagtaaatataaaaactttattggaatagcatgttagcagcagtgaacagggcatggcacagaaggtttccaaaacaagtttagcatgaaggatgccatatgctgttgccaacaactagaacacggtgactaaagacacagttctgaatgtccagcacaacctctggcctgcaactatgttcagtgatgatgataaacaaggtggtgacttggaaggaatccctatgtcaagtgagaaaaaaaaatgatgtctgacctccttatatatgtaaaaaatataccttcagagtccgtcagtaagctggaagaagtggatgttgaagtttttaacatcgatgatgggtctccagttgttcatcaacccatggtgaaatagctgaacggttctgaatcaaaggtgatcctaatagtgaagacattaacattgcagaaaaagtgcctacagattatatggtgaaaatacgtgatgggcttcttgaaggactagagcagtgtgtattcaaaacagaacaagaaatcacgtcagtttataaaagcaaagagaggtttctcagacaaaaacattgttcatgaggtagatgactctggaagaaatactttaaaaagccactgagaagaatgcctcgtctccacaggatccacttcctagcctctcaactgcttctcatgtttcttctcactgaaaaaaatagtgtccagtaatctttactccaacagtaccgccagtggggacaggaaacttgccgtggctgttcttggttgtggctgttgtctaacagctggtgcagtatctggtgatgcccctgtgctgcttagttacttgaacgcagttttttcactgtattaatagtgtgtcattttttaatgttaagtatttatgtgtgaaaaagtgttaagaaaaaatgactgtttattggcagcatatacactcagagtcaggaatgatagtgatggcaaaaaacccgactgtccacatgcgtggctgagatatcactatgacatctttgctttttgctttctgatggttcagcatacacaaactttgtttcatacacaaaatttgaaatattgtataaaattatctttaggttatgtgtagagggtatgtatgaaatataaatgaatttcatgtttagacttgggtcccatcctcaagatatctcattatgtatatgtaaatacttgaaaatctgaaaaactctgaaattcaaaatacttctggtccaaagaattttggataagggctgggcaatcactatagttaaggagctggaaacacacattcatgcaggaaggaaggaaaaaggaaagctctcttgaaaatatactacttccatgatgttatccttcaaagtgtaaacaacctgcacatacttcaaccataattactagaagtggggagaagggtgcactttcagtagtgcaacaatatatttgctatacttagttgtatgatacgactttggctcctgactgtatccatttctccatctatcatctgcacctggaatattttcttgttctttctctgcttgttgaaaggctcagctcaaatatctggttatactaaccaggaactaatttgttcttctcaactccaaaatatatttcaacagtaattaacaatttttaggggaagtacacaggtgtttaatagagatcctaactttggagttagagagattcaagcttttctacttctagatatgtgacaaggtcaggtaaggcaggtttcttggttgtccccttttgcactgtaaacagagttttcattcaccgtctgttggggtcttagcttcattcacgagtctcctgttacagctggtgcctgcctgaggtagggaagtcgatcttctaccccttgcacaatcattaagggagaaagctccaagtgtccattctttggtaagaatcatgagggaaaaaaagggcttccgcacttctctctcagtattcctgcttttatttcattttttgacctttgtggaatccttttcatgtctgtttatcaaaagatactaaccttatccatcatttttcttcatttttgtgatttcaatttggaggataaccacagaaattaccttctggtatacataaatctagaattaatatagttgcatcattaccaaaagtcagaaaacttctaagtacagagaagaatctttgtcttgatattattttagagggataagaagcaagaacggaaatgctaaatctaactctatccaaggaatttcctcaactgcctttccccaaactccctgccttggaagaaagataccaaagatgtgtggagaatgttgcacctaactgaattctacccatttctgaaccgaaaatggggaaatataagttttgagagctaaaactgtctagcacttggcttcacttggtttaattcttttgagatttacttttaaatttttagtttttttttgagacggagtttggctctgtcactcaggctggagtacagtggcatgatctcagcttactgcaacctctgccttctgggttcaagtgattcttctgcctcagcctcctgagtagctgggattacagctattgccaccatgcctgccaccacacctggctaatttttgtatttttggtagagatggggtttcactgtattggccaggctggtctcgaactcctgactcaagtgatccacccgcctaggcctgcccaaagtattagnnnnnnnnnnnnnnnnnnnnnnnnnnnnnnnnnnnnnnnnnnnnnnnnnnnnnnnnnnnnnnnnnnnnnnnnnnnnnnnnnnnnnnncaggcagaccacctgaggtcaggagttcgagaccagcctggccaacatggcgaaaccctgtatctactaaaaatacaaaaattagttgggtgtggtggccagcgcctgtaatcccagctactctggaggctgaggcagaaggatcacttgaacctgggaggtggaggttgcagtgagctgagatcatgccacgggactccagcatcagcaacagagcgagactccatctcaaaaaaaaaaaagtatacacaactcaaggtatttaaacctgaaccactttatagatattataaattagaaaaccacctacaatgcaaccaacagccaccaccaccaggatgaaggtctgaaaggaagcacagcaggttcttgctacctaccaggtcattaattgtattacttgctctgagacgggaagactcataaggtaatatgatacaaaatgtagctgattgcacaaatgatgaaataaaatccttcaacagacaaatacttctttggttgacagtttattaaatacactacatttgtaccttattctgtcgttttttaaattgttcacgcatgaactgagtaaaaacgtactttatagaaaaccaagtgcaaaactaaaatgaaagaatgcacatattgcacacatatgaaactgctgcaatgttagaaattaatctgtacaagtacctaatgaagaaggttatgaaatattaggtggttcgagtttcttaaatctggcaccagaccatgactttgaaagtgttaatgttgaagtgtcgatgcaaaaatgtctattaacaaaactgcttaacactgtttgagaaacaggacaaaataattgtttttctttcacagacacttttctgaatcaattctctacagactctctcccattcagaatcagttgggtggactgatgaggcaaaaaataaattccttttaaaaaacaaaactggagcctatttacaaaacatgcaaagggagaattttaagcaggtgttactgcagaactgctcagacgtgaatacagctgagtgacagaatatacctttacttctacaaatataggtccttcctccagactttctggaagaaatacattttcagggtgtggactataaaatggcatacaatgcagagacagaaacaaagaagtttgcaaatcttttatatttccagctgttgagacagtatttttgagggctgatgttacctctagcggcgaaaccagagccagctattaagcagccagaaagctacagtaattgaatacatgaccatttctcttttagcacgttctttgttctcctcttccagaagttgtagacgtctatttagtttgattatctaagtgaaaaacaaacacacaaaaaatataatatagaggctttaatgaatagggcaatcagattcttataaagtaagtagtataataatttgtcaacaaaagtattattacaaacatggaaagtttcatttggagcaaaataaacacaactacacatagaaaaacatgtcattcatgacagcttaaattcacttaaacatcctttccctttcccttcttcagatttctgagttaggaagggtgtatttccttcctaacttgattacatagtgaggtgaggaagcggttacctactgttattctggcagaaaagactcagtatgcattttggcaggcttaccacagcagaaagaatacgggactccttcccctttctatgcctctcctatgaacttgtcactcaacctcagttgttcatcttgaacctggcataaccgccttctctgtccacctctgagttactgagacaatccaataaaataatctactgtagggggccttgggatatggcacccaaacccttcaggcctgaaggctaattccccagctgctggaaatgctgctggctgacagtaccatccttgctgttagcccttactgtgaaaatcccagggctgaacaaccacctgctaaagcttgtgttctcctactgatcttcacctaaaaatatcttatttaatccaatttccctctatatctatttggtatagacgcaatgagaaaaccaactatgccttcttcacatgtgtgtatgtctgtgtgatactcgaggctgtgggagtacatattaaaaaatatgcatgtgcaactgcagttctaagaaaggatttattacagaatacaggaaatacgtatgcagggacgctgtgcaagctgcaaggagcggtttccaaaatggagttattaaacacagtaacaaaggttccaaagtgattgttccacatttcaaaagccaaacaagcaactgatggctgtactggtttgctaaagattctttgttactggccagaattacattaatctatcttggtaatactgttttacggtgatcaaaacatgtaaatggtagtttaatatatctttaatcaaaatgagaaaatcaatgatggcttactagtttgatagtcccacaggagagaaaataataaaatgttgagaactatcactttaaaatattgtatgaatataactgagaaatatatcttatttggtacactaaatacctgtcgtcttagtgaagctgcatctacaacagtcaggtcatctgacgttccttcaatggttgtatctatatttgaaatgccatacctgcagataagagatagaaatacaaatgaatagtaaagtagaactcagagtaaatggcacgccacatcatgctttgtgtaatgctcaaagtagtattcagaaaattggtacttaataatatgaattactaaaatattttactacctgaatttgtactaataaaggaaagaaaaaagcttaaaatgacaactgtctacaatattgaaaaagggcactaaaaactggagaatgggaaaaaaatcctgactaaagaaacacatagaaaattctcaagccagaaggattggcgatgctaaaaagggtccctggctgaaaaggtttgagagctgccacttaggatagaacaaaatataattcttacacaaacttatgtccatatgtaagcccataggcacagactcactagcagggaacacaaagtagactaactctaaaaaaagaaagactcatcacctcttctcactgcctcttgtcttgccatttttattctttacttcttgtctttttatttttttgagacagagtttcacttttgttgcccaggctggagtgcaatggcacaatctcggctcattgcaacctccacctctggggttcaagtgattctcctacctcagcctcccaagtagctggaattacaggcacctgccaccatgcccggctaatttttgtacttttagtagagatggggtttcaccattttggccaggctggtctcaaagtcctgacctcaggtgatccacccacctcagcctcctaaattgctgggattacaggcctgagcaaccacgcctggcctattctttacttatttccaattacttatgctctactgtgttctcccgcagaaacaattataaaatctcctgaatacatcttaccactacatttagctccagaattggcccaataatgaataaaatgctgtgtataaaataatactgaaaaaccattaagacaaaatccagagaaagcatattaaaaaagtactttttgttccaatgtagttacttctaaagcggcactaatttctaggtgaatgacactaaacctctgaaaaacaaagacaaacgccattcctcttctttgcctggatttccacattttaaaatttagtttaattaatagcttcattgagatacaacttatataaccacataattcacctcacatgtattttataccctaaatggttattttagtaaaatggcatagtaaattttctaaatgagcagaatataaataaactaaattaaaagttattcctgtgtagtccagagaattggcaaatggatcatctattctaatacctatcccagcaagtccccactacaaaaagtacatacccacaaaaagggatatgaagcagaattatacttttcatccagacatgttaaagacaagtctactcagaaaatccttttgttttaaatattgttaaaagtaataaaaatactttaataaagtatgcaaaaaaccttaaacaatagatggtgtgtactgactctagataatctacaaccatctccaaatattccttctatggctaaattatcctgctttctcattaactgtctccttatttcatgagaacacagtaaacaacctggagcagttagggtaattataccagttagagaagtaaacttctaagttagtagatgctggaactatgggtttacaaatgattagtggaaaaaataaaggtagaagattcccttttccttcacttcatcctcaaaataaaactcttctcttttactgaggccacataacagaggaataattaggaaaaaaatcaaacagaagcaattgttaaannnnnnnnnnnnnnnnnnnnactgaacatacagaatgaagtacaaatgaaagcgattactcacaatttatatcctgaattaactaaggtttagatatctgaaatctcgatttgcaaagaaatataaggatatgacaaaagattttacctatatacttcaatttaaaacaaaaatatgttactttacattgtgttttaaacaaaaaccgtatttattagaactaaaaaactctaatgctaagttagaccactggctgaaaatactctgacagaaagataaaagatcacaaacttagagaaaaatataagggaaaacgacaatgaactgaactaagattgtaaaaagaaacaagtcagcagagtggtaagggattaccacaggcacgcttttcaattcctccaccatgaattcaattttaatgagcagctaatgcttcccttttctcttgcttcaatgaatgcaccaacttctaagcacagaaacgatgctgccagttttaaatctactgctaccgacaatatatttctgcttaaataaaactgactgaaaaaattatacagtaatagcatctgtgaataccaacaagtttttgattttttccagactataggaaaactaaatggggattttggcacttaagaactgcatgtatttgtatgtgccattctgccagcctctgtgcgtgtcaggaagaaaggaacgctcaacctacgcgtgtctgaaagtgtaaaaagggcaaaaataagagagaaggccttaaatcaacagatgataaaaatgcttaaaactaaatttcctttctaaatatgtaccttcccaaactgtggagttgttaatgctgatttctcccaatttaagatgaagccttacaaacaaagacaggtttgttcacacactaaaagtaacattccagataattaacaacttaaaaggaaatgctgggcacaattcaggcaaccattaaaatgatgtacataaaataagatttaagacttttttctgttttagcatgtaaattattataaaccacctataaactattaacactacacttaaataaaatagctgttcacatcataccataattattaaacattttccctcatactaattggccaaatgtcatgactgattattcactgttcttagagagaagcaagatgtactcatcgaggaaagctgtagaaacaagttcagctacaaacacaggcatggctacgacatgcaacatgccctgcaacacacaaattccgccaagcatttaccctggtaattacgaagtctcaaaatttacctgacgttgtcatgatgaggattagaagtggcggcagcagacccaccacgcaacacaggtctaaggcaggtttttgcgggagaaggcacaagacagaatcaggaaacagagaagtaataaaataaaagcaaaaacaagacaaataaatgtcaaataggattatattgtatatttcaatacaatataatatctctcaactactttaaaaaatccttgtctcatgtgtcctccattttatcattttcataaactcaacattactattgatcaaagaaacaaagggaatctatatttacacgacaaaacagcaccaacatataaaataattttcttggtgctttactttatgaaatttaagacagaggacaactctgcttaaaaagtgtaattcctttcttccagttggaaaaaaaaaatcactagcacctttaaaagcatatcaggacctggttagctgcaccg

SEQ ID NO: 1678 - DNA, 2294 bp, Homo sapiens
atagccactttgacaacgtttctgagccaggggtgaccatgacctgctgcgaaggatggacatcctgcaatggattcagcctgctggttctactgctgttaggagtagttctcaatgcgatacctctaattgtcagcttagttgaggaagaccaattttctcaaaaccccatctcttgctttgagtggtggttcccaggaattataggagcaggtctgatggccattccagcaacaacaatgtccttgacagcaagaaaaagagcgtgctgcaacaacagaactggaatgtttctttcatcacttttcagtgtgatcacagtcattggtgctctgtattgcatgctgatatccatccaggctctcttaaaaggtcctctcatgtgtaattctccaagcaacagtaatgccaattgtgaattttcattgaaaaacatcagtgacattcatccagaatccttcaacttgcagtggtttttcaatgactcttgtgcacctcctactggtttcaataaacccaccagtaacgacaccatggcgagtggctggagagcatctagtttccacttcgattctgaagaaaacaaacataggcttatccacttctcagtatttttaggtctattgcttgttggaattctggaggtcctgtttgggctcagtcagatagtcatcggtttccttggctgtctgtgtggagtctctaagcgaagaagtcaaattgtgtagtttaatgggaataaaatgtaagtatcagtagtttgaattaatttgagaagtacacttgttttcaaagtcatctttgagatgatttaaaaaatcaacccttcacgtagaaagcacgttgtaaatgcataacactctcatatcagtggttgatttgggaaaggtggagagaattttcaattagttttgtgttgtactattcaaattttttacctcttcactgtgtgtagagaaaggagaagggaaggaggatgagaaggaacggaagtcatcctgaaaataaaagtacaggactttttttttttttttttgagacagggtctcaaaaaaggctggagtacagtagtacagtggtgctatctcagcttactgcagcctcaacctcctgggctcaggtgattctcccatctcagcctccctagtagctgggactacaggtgcgtgccactatgccaagctaatttttgtatttttagtagagatgggggttttccatattgcccaggctggtcccgaactcacggactcaagtgatctgcctgcctcagcctcctaaagtgctgcaattacaggcatgagccatcgcgcctaaaggacaggacctttttattgtatttctttaaagaataaatacataacctgaatgcaatcaagtctttagatctaattctcagcttgcagggaacactaggacaaatccaaaaagtgggtcagcgggcacagaatggcccaattttcaacaggaaaatgttataaaagaaaaatatttttgagggaactgttatagattaagagaatagaggcatgtttcagctaaacacatgtaaactttgtcagagataattgggaggagtatgtagaagaatcggattattgttaattttggtaggtctgataatggttttatagtataaaggctgagtaccccttatccaaaatgattaagatcagaagtgttttggctttcacatttttttggattttggaattttgcctataataatgagacatcttggggatgggatgcaagtctaaccacaaaattcatttatgtctcatacacactttgaacacctggcctgaaggtaatttcacacaatattttaaataactttgtgcatgaaacacaattttgactgcattttgactgcaactcatcacatgaggtcaggtatggaattttccacttgtggtgttacgttactggctcaaaaagttttggatctcggagcattctggattttgaatttttggattagtgatgctcaacctgtatacagaaatgtcctcatttttaaaaaaagaaatgcatatttatatgttttaaaattacttcaaccaaaagcaacggggagatgtttactgttatatttaggtgacaggtacatggcaattcattataccctcctattttcctatgtttacattattcattaattaaaaaacaatacctagaaaaacccaagactttcaaaagctattttctatatgtgccaatctttaaaaaacaggataacaagggtatttatcacattaaaatgttgtaaaacagcaaagctaaaaatctaa

SEQ ID NO: 1679 - protein, 227 aa, Homo sapiens
MTCCEGWTSCNGFSLLVLLLLGVVLNAIPLIVSLVEEDQFSQNPISCFEWWFPGIIGAGLMAIPATTMSLTARKRACCNNRTGMFLSSLFSVITVIGALYCMLISIQALLKGPLMCNSPSNSNANCEFSLKNISDIHPESFNLQWFFNDSCAPPTGFNKPTSNDTMASGWRASSFHFDSEENKHRLIHFSVFLGLLLVGIVLFGLSQIVIGFLGCLCGVSKRRSQIV

SEQ ID NO: 1680 - DNA, 34151 bp, Mus musculus
  misc_feature (1)...(34151): n = a, g ,c or t
taaaggtggagatgagctgggcagaggacagcaagcatggagacagagggagacacagaggggtcctggcaatgacatctgctctgctctctcctccaccgcagtagaagaggctgtgatgggttccacacactgtgtgtgtgtgtgtgtgtgtgcgcgcgcgcgcggcgtgcgtgcgtgcgtgcgtgcgtgagtgcactgtgtgtgcactttgtgtgtgtgtgtactgtgtgtgcactgtgtgtgcgctttgtgtgtgtgtgtactgtgtgtgcactttgtgtgtgtgcactttgtgtgtgtgtgtgtgtgtgtgtgtgtgtgtgtgtgtgtgtggtgcattcattccttcatttgttttacatggcaccctttaaactctaccacaaatcttacaaagcaaaccggcagatccgtgatggcccagaccctgaggccacgatgtactgctgtacaggctgtgcactgaaccgctccatctgcttcaggagtaacagcctgtagccctgctccacgctgccatttattactagtaattacctattctctttctctctgtttatataacatgaagagagtaagagctaaggatatggagtatgagacagagaaatgcatgtgataaggactggataggataaagcagttgagggggcacggtctaatgtgatctgccaagagggaggaaaggaaccaagagcaggcgcaggaagagcacttggcactgaggaaagggtctatgcaaagggcctggggtggaaacacatttgctgaatcagcaggcaggaaggtgagtttcctgttgtaatccaggaggggctgtgtgcagggaacagagaccacagggccacagtgcccacggtgacaggtgagaagggaggctgtatctcccagtctcggatctgctttgcaagggctctgttgggcaggtgtggggtggtgcttagagctgggcataaattagcactggacataaattagcctgggtaagaggagacaggagtggtcacttagagagggagagaaaatctccaagggttactcccagtgggaatgggggtaagatgacatcttaccgtcagaagggggaagcatatttcaatctgccttaccgtctaggaaatgaacaagatactgactgtgctcccatgagaagctgagctaacagactcagatatgggggaatgccactttgcttctcatggctctggagagacttggaaaaaccgtctccctgccttagcatccccattctctcttccatctctgtgaacattaggtgccctacccaccaccgaacctgaggttcaggcatcaccaggctctgtgcgcaggctggggctaaaagcacatgttagccattaatgaccccagggatggtgcagtttacatgcctgctgggctggttggcacacgctgtgcccttcacataaagctataaagccgtaacttatttatacccagaaaccagatcgttgccttctgccagctctccttcatcccttctcaagccaggcagagagactcccacaatgccctggtgctggagcatagtggagcagaagaaagggccaaacaatgttgtcaaggcaactgatgacctactatgtgcccttcatgatctttcactgaattatctaaatagttctgtgaagggagggagagagagaacagggtcctgtttctattagcagttccctccacccggaagtcatgtgcagatttccaagtcacccactacagtgaagtttggcacagtagtaggatctcagggaatcccataatcatgacactgttgtgccagaaggccccagaaggccacagtcagccaaggctacacagctaagagtcagcagtcagagggcctgagactctcggcaaacatgaagcctctttgatggttggatctcaaagttacccagtgctgctgtgtcctgggggcctgtgctggggccaaaagagccaccgtctcagtgactgtggacctatgaagacagacaggtgacagaggagtctgtgattcgctgtcgcagccgctatggccaggtgtgctcagacctgtaagaggcccttccagttcttggcaggaaggacctctctggaaaggatgctgctggaaacccaggctgagcaaaggtcagaaggggcggattaaagctctcctctcaacaagtaggggcagtaaaatctgtagtggttggagatctgtggggtggggagaatagcagctttgccacccacagatttaaggattcagcctttttgtgtataaagacaacctggaccccaattttccatctaagtgatgggccacctcccagaggttgctgagtttgagatgtactcgttaagatctgtaccccgaagcctcatttaatactgggctttttttttctctctctctcttgctgtgatggagggaagtgggcggctggtgagctgaacgctgagagaagggagtgtttaggggtcccttgggactagagattatccacgaggcccctcctgaggctgtgcttagccctacagagggaggaacgcggcctgagcagcctcccaggtgctcgggtagatggcccagccaggggtgaggcaggccgctcagggctgcgcagctcccagcagttacataaggacgctgggcgccggagagacgcctttgttgctgcgatccgcctcggcagcgccgagtattaataaaccgatcgcccggaacgcaggcgggcgggcgggcgagctgcgggacgattggggctgcagcgccgggagggagcgacacccacagcgtcctccccgcaggaggagactgattctccctccaagcttctcgccagcgcccttcccttcctcgcccacctgccttcgcaggtgggtgctaagaacgcaaacagtgatccagaacccaccactgtggactccagccgctttgctaccgtttccatgatgcatgatatctggccttggccttacctgtaagacagcagaaaagcaccgaagtgttaattaaagtacccctgcctcctcctgccttctccccactcctttcttccttccctccccctctttctggtcgtcacagcccctatctagtcctctgcctctccctggctttcttccctccccctcctcccactctttctctgcctcctcctgatcttcttccccttccccatttcttcctccctatcctcctctctctcctcttctcctctgtggtgctgcaaattgaaactaagatcccacactacagcaagggctggaccactgagctacatcccctcccctcccctcccctcnnnnnnnnnnnnnnnnnnnnnnnnnnnnnnnnnnnnnnnnnnnnnnnnnnnnnnnnnnnttttctcctttcctctctgctggagaacaaacttactggtttgtgcatgctaggcaaatactgtaccaccgagttaccaccccccacacccccactctggggccttcagttgttaagagtgtttttgtttatttgttttgtttgagacaggctcttgcccaggctagcctcaaactcagcaccttactagctcagcctcctgagctgggattactagcttgcatcttgcctagaaaagagtcagttttcatgagctaatgtaggagcctgatgcctccccccaagtctgttcagtgcagcccctggaatccttaggagtcttgtggcaaggttactgccctgggaacccctgcccaccccagctgtctactcctttgcttggggtagggtatacacatttttaagacttcctcccaatatgttctgagaaccacagcttggtaaatccatttgcactcagtcatgaattcagggcctgggaaagatagtcctgagtttaagccctagaacccatgtaaaagctttcctatggtgacttgtacgtgtaatctcaggctagagaggcagagacactgagtatctggggctcacggtcagctatagagacccagtcacaaaggtgtgtagcattcctgaggatgacacttgaacttgtgcacatgttttacatgcatgcacatacatgtatacatatgtacacaggcacacatgtgtgcatacgcatacaggcatattttgaaaattctgtttgacagatattttcctgggacaacatgtgagttcacttggtaaataaacatgggtgacagtttggaggagaggttaggaccctaagggacactgtctatgggaggcatgacaatctctgttgtagtcatcagcagaactggagccattttgggctagactgccagagttgcatcctgatctgtctaatgtatgactcactgagccttagtttccttatctataaaatgggtgaataatgaggccaacctcataagactgattaagaccccactcagaccaggaaagctcctagagtggggtcagaatgtccttctttgagagaatatgaagtctgctggatgtggtacccaaggggcccagcatcgttttgagtaggaggcagttaaaagactagttatagtctaagatggaggcccacaagccaggacatggccctcagcacagggctactgctgtgagggcatctggggagtcaccaagaatcagctgagaatctagaatctgctaccctctgccttcattcccacagagactcttttcatacataccagggtcagcactcagagagcctctagccagcctgaggccctctcctatctgatttgtgggagtgtcatctgcccctccaggtgaaccctacacccttgagcttagaacaccaggcccctcccctatccctgacctgctagagaatgtctttctttctggtagcagcatgcacccctggctcctacccctgccttctgtagctcattcatcttgagaacaatgagtgttttagggagaacttgctgggagtcaggccccgagttaaggactcacccaagcagtttcctcagtccctcaggaccctggacatcaccacggtcactctttctgtttgacagaaagactccaagaggctaagggacttgtcaaaggccactaagataaagaggaccagggccttgtacctcacttggtccaggaaggatatgctgggctggtcctgtcagctcctcagccttcctgtcactgctatcatgggttggtttcccaagctgcccaccattctttctctgagaggcctgagttccactgtcatcgtgtgtgtgtgnnnnnnnnnnnnnnnnnnnnnnnnnnnnnnnnnnnnnnnnnnnnnnnnnnnnnnnnnnnnnnnnnnnnnnnnnnnnnnnnnnnnnnnnnnnnnnnnnnnnnnnnnnnnnnnnnnnnnnnnnnnnnnnnnnnnnnnnnnnnnnnnnnnnnnnnnnnnnnnnnnncaccgcccccaaggcttctttctccaggtaaggagctgtgtgacatttcttgttcccccagcatccatggccaagtgttgcagtggagatgagtcagctggggagggcagccatgggggcgtgtgttagggacggctagtttacagactggaggagaaggagggggaacaggcagcacagggaggtggggagggagggacagccagggaattcctgatcttcctctcctccttcagacccccaaagctgagttcagcctacggcttcctcaaaggtcttggctaggcagactcagaaagaagaggctgtggaaatcagaggagccaggaaaggaaccagctcaactttctcttctgcttgggcttcagaggtacccatgtggtaggcagccgtaactcaccctggcttgtcagttgtcacctcagaaccaccctctacagtctcagaagcacctttaccctgctcccagcagccggcagccatagctgcaggaactttctctgtgtagctccaagctaacggcttatgacacactgcactgtcacagctaaagttcttgagactccgaagaggtccacccagtcgatcactctatgataacatagaaggaatcagaggctcagagaagttgcactgctggcccatggtcccacagccaggatttaaacccatgcctgtccaatattcccaagctgaactacgactgaactcaagacagtcctgccctcctctaacatgtccagagaggtgccatcgctgagacctctctacatgggccctgctccaaagatcatgcccagtgctagttgctcctgtgagccctctaccctcgcccccccccgaccccgccaactctgctctaactgcacacgccttcttttgaattatcatcactgctattattatactgatgtgtgtatgatgaggatacccaagccatggtacccatgctggcatcagagaataacgttgtaaagtcagttctttcctcccaccttacataggattcagggattgaattcattagggctgtacagcaagctcttgacccactaagccacctctcctgcctgcatctgccttttttttgtttcgttttgagatggtgtctcatatcatgcatatagcccaggttggtcttgaactccttttgtagctgaggatgtccttgaactgttgatcctcctgcctctgtttctggagtgctgggatcacaggcatgcatgtgtcaccacgccctgctcatgaaatcgtattctctccctcagggaccatagtcctgaagtgagtcgcgagcccctcccccatcgttcacacccacttgcacacagcgctggcacagttagcacacatacttgcacatactccctacctctagggcacagaggtgttgcctttcctgcggagggagcccaggacaggacagatggattagcagctgcagggtcttcgtaggagtaaccctcaccggttggctgctccctacttctaaggctttcggtagaacattttagcacattcggaatcgagcttctacaggaacaataggaatctgagtttccacttggcaaacctttttaagcagtcgcctcactggcttctcgaaagctccaaggagcagtgataactgcatgtccatttccttcccagatgcaacagagggtcactaggacagggggtttggagaggcctttaccatcacagttcacgtcggctaactatgcgtgttgcttcatgttactatgtgcctgaccaggtaagctcgcctgcagccgatgaaaggatgaggtaacttagaaacatgtttgaacaaaggactcagcacatattttctcttactctgccaggcacctctgggaaggatgcatgcccccatgctgtctccatttattggttgaagaaatacaaggactaaatggtggccttaagaatgatcttaaacaaatgcagagttttggagaatgtatgcacagaggtgggcacactaggggagtggatggggagatggttggatagtctcttgtccctcagtactgttttttccaattagctgtagtgagcgctctgtgtctatcagcatgcaagcagaagccagagagaggggtgaggtttaccagagggctctgtacttggcattgccgtcgtggatatcctctgagctctgtgttctttcagtctcccagcctgtcagccttgattgtgagcagtttcccttctgttagagatcatgggtacatatctgtcctcccaacagggtgggagtcagggatgcctttctgtcaactccaaggccccaggactcagcactttacctagcacacatctggatagctataccttctgtgatggtttgtatatgcttggcctagggagtggcactattaggaggtgtgaccttgttggaataggtgtgttcctgttgatgtggcttaaggccctcaccctagctgcctggaagccagtattctgctagcagccttcagatgaagatgtagaactctcagctcctcctgcatcatgcctgcctggatgctgccattttcccaccttgatgatactgaacctgtaagccagtcccagttaaatgttgtccttataagagttgccttgatcatagtgtctgttcacagcagttaaaccctaactaagacactttctttgcaaagcatatggggctctcacttcctgataagacaggcatggaatctccagaacacagatgcccagagcttatagctctgtctacaccgagcatcactgaaagtgtaagtcctaacactggtgaccctgtttggttccacttgcttgctgctaatgaaagtgagatcattacttctaacatagcctcttctttgagaaaccttgggccattgccattaggcactgcttctggaattctgccttcaggtcctgcttctggtagaacactgggaggtgtttctaagctgggaggtgctcagggatgacactgttccagtgacacagcccagagccctgcatgccaatagtgcaacaaagaatccattatcccatcactgtcctgaggtgagactctgaagcaagccacaatgaagctcctggtcagggacaggtggcttggatgtgcacttcactccacacacctccaggcaggcctgatccagagctacagacatgacggctgagtgattcattcattactggtcatcactagccaggtgttcagcaaaagcgggtggcactgtgggaagggagtttagttgccttggtaatcaggaggctaacagccactgagagctgacttgctatgcaccagacactcttctgtttacttccttgcaaagggcacagcccctcctgtccagccccagccactgggagggccatggagcctacctggtatgttagcacctcacacatgatcaggtttggttaacatggcctgcagctgtaactggaatctcagcaacagccacaaggtacttcctgctataaggtcacacccctttgtaggtaaggaggcaagacttggagaggttaggaaacttgcttgcctagggctaagctaaacaacagagccaggatttgaacccaggtattctagttctgtagcctggagcagaaaagcaaaacttaactctggagccagaggcacacctagttgagttatagtgaggggcagctactctccatctctgccccagttctttaccttcaaccttgcttctctcagtccccaccctccctcaagcctttactatatcagtccagaagacaagatccagaggtttctttcagcaggaagcagggccctgggcaaaaatcaactgctataaagggtttctcagggagtccagagccaggcatgggacaggttgtaggtgctggtctttttagtttgagagacttctcaagactcacctgggactctctcttggcatgagctgtttgcttccaccaacaaatactctgaagccacagataagatccaaccttgccacacgcagcacatagcacagcaactgcagtagaagtctcagcgggtaagagttcttgtcatttgggattcacaccaaactggggagatgggtgacctgggtgacagaacactcattcaccaattatcttaaggccttggctatgtattaatgactcgaagttttgtgaactgggactagtcctattggactgctgggaacgctaaggttttatttttgaaagtggtttagcaaacgatgaattgtaaattgcttttaaccgtgttgtttcacccgtgggggaccctaacagtcatagcaggtgccttccttccaccctagacaccggcctaggcctgagaatggatgtttcataaacccgtaggggtatgtttgcagtccgggagaaaggggcgctgtcttcagaacttccgagaaagtcctgggtggcacagcggcaggttgtccccgtccggggatccccctagccaagcgagggtgcgccctccgcaggcggctcccggtaggccctccgtttcagctctgggtctcccccccaacccctctgtgcccgccccggccacctcgggggcgaggcagcccagcgcgtgggaggggacggcgcgccattggcttgtgcgcggcactagaggagggaccagtgcgggccgccagactcgggcgagcccagcagcgccaggagtccagcttgccctgccctgccctgccctgcctgcctagcgcggcgccgcgatgtgagactccccgggccggagcgtccgcagggcacgccagctccgcgagcgcagcaccccgcgcgccaggaacgtaagtctgctgccggcagccgctagcctcacacttcaccgccgttgccaccgcgctggccgctgcctgcgcagcgcagcccggggacgccggggggccttagggaccgctgggggcatcgagcaccctgcgaacgacagccgggcgccaggacagcttggcacttgcggggcggcgggcgcccgagacccccgctgagctcctactggcactgtcctctgtccttttcgtttgtccccttgcactgactcggtttccctttctcccccagctctcttctccgccacctccttccccaggggctgtttatttcgctctcggcctcctccagggctttatctctttgattcggagctagtgagagcggagagtaaagcagtttcttttatcccggggtctctgtcttcagcgcttggttctcggtcccctccccctttctcgccaccgccccccctcctcccgcctttgtttcccggcgggaggattgcgcggtgtaaacttgcgagtttccgggtcctcgcccccacgggtacgcgggcggagaaggtggaggggttcccgctgtccagtggtctggccggaccttttgtgtgggtgccggggactggaggagtcgcggactctcgcttcacaaagtgggggagtgtcctcggcgcggagatgaagatagatcagagggggaaggggcaaagccggcgacactcctgagtccctgctggagaggagcgggcagaaaagtgtttgggcctgaccccagtcgggggtggtggtgtcaggagggtattgcaggtggacccgggcgactctctctcccaaaccgcgcagacagctgtaaagtgtagcgccattgcctggcgcaggatggattggggtcccgtgtagtgcgcagaaaatattacgcgcaccatcctcggggcacagcgaggccagccgctcgcttcggctcccctttcgtcgccttcttgcatcctggatggagcgggcttctcctcctgcctgtgaggtggaggagcagggataggcccaggacccactcccactttgacccaaagctttacaagcacacggccaaggcctcctcaaagtcccccagcacggacttcctgtttcgtttcttttagaaaaactttctggatggggcctggagagagtgtagaagtccctgggttgcagggacacccacccagctgtgtctcccgtctggaggctcctggagaaaggccgccacctgccgccggcgggattggtgggctcctggaagaatccggaagaacaccacccgccccttagtggcagcctctggctcagtccgaggctaaaaaaaatactattttcctgtaggatctttggaaagtcagaatatacttcgggtttctgttgtcaccttcgtacagacagagcgctctcctagagtcccctctggccttcgtgtcttaggtgccctctgccttagcttctcttcttctggactctcaggtatgtctgccttcacttgctgttcctggctttgatttttctgggtccaggacctctgccgctcctatcacctcaactcacagcctggacttgtgacagccccctctgctggagacagaggctgccggctaggggcagggtcttcacgaattattcttggcttttctgtgtgttcacttactgctccaagtatcagtgagtgagccacagaagagtgatgtcgcagtggccagcacgggtcccacaggtccctgcacacctgtggaagctgtcaagactctagatagtgctgtgtcttaagcaagatcagataaataaataatacataagtcgattgggccacatgccgtgccttggcgttttttctcaatacccagaaggctgaggcaggaagagtctgaattacagaccagtttggactatttaggaagaccccgtctcagaaagaaagccagagtcaggggaacatggagagtgttggggtgttgaggccatttttaaggagtggtcagtgctgctttctgggtcctgcagaatagcctgtgcaaagagccagaggcgcagcactgcgctgatcctgtggagtggggtgaggaagagacaggaggcactggtgagacaggatggggacccccacatctcacaggtgatattaagagaggatctgtaaaccagcatcttacagccccccccccccagttaggaggggcagccacggggtgccattttgttctgaatccaggtgggaaggcctcatccccagtagcattctctgtgtccctatcacagccacagtagacagggacaggaggacagccgctcaggccaagtgctctggaaatcccctgtctcccaagaccctcatgcttcttcatgcctgcctgggtcagtgtgctggtcatgacccagagtcaccttgattctgcctcaccccacttcctcctgatactaccctctttggaacactctatttgcgtgggcatgaattcctggaaggggttctgctccgaaactgctttagtaaagggggtggggggactggggcccaggtgtttgagtctgtcggtctaaacagcagccttgttgatcactggctacaaaaacacaaactattctggatgtttgtagacgacttctcttcagggggaagtgtcattatgcccatttaacagatggggaactttgaggcccagagaggcaggcctgtcttccgacaccatgcataggatataggggtagaggatgtgagtgagcttggagttttgagtgacttgccttgttaatcacttagccagagactaagtatgaagagggagatctcagccttggactctgatccctgcccaggggaaagcatggcttcagatcatctagtctgaagacattgtgttaagcttgtcttcaggggaagacacccccccaccacccccgcctccacccccaacccccattgccccttctgttttgttgagtagcaagggagaggtctggggaggaatgacaatagttgaggggaactgctgcctattcacaggagagccctggccctgtgggaaccagaagctaatggatgacagggccagctgcccttgagggcactgactctcggtcaccaggccccagggaggctggcccactcagggttgaaaaggacaggaattctccatgctgtgccttgccttttgcaagcgacagaaggacaggaaaggccttgtcggtgacttctgagaggctgcctgagaagctggccttggcttacacggggcagcagcctcagccctctgggtgaagccaagccctgctccccgaaggcaggggtgtggctcccaccctctctcacacagctaccattggggttttttttttttgtttttttgttttttttttttttgtcccctaagctctgaagatatatgtgatgagagtcagggctttcccccatccctctggaagtcagccaccttccaaagacagagaaaggaaagaagatagaaagaagaggaaaggaaagaagagaaaatctctacaggaaagcgggaagaggctgggaggggctgctgaggctgggcagggcctcgttgaaatgcaaataaatgtgtttatatagctggggtcagggttgcctagtcaaacctgtggagggccctcgagaccacactctccacccacacagaacactgtcctgacagcaagcccgggctcatcatgcctgtgacctcagctgtcctccttgaagcacagtgattcagggcaccctgacctccaagtgccagggcaaaccccgtgaccccagatcccagactcagggtcttgagggttcgaggaacctggtatggactctgtagctttgtccctgggatgggtctgttaccacgtccgccacactaaggacttgaaagcatggtctttgtcacctgctccgttcacagccagcatcttagtgacaatggagcccaccggcacttctctgtccacccaggcagtgtgctatagaataatttcattccctggggactaaggctctgcttgtctgccagcaggccctgggcacagtagcttccttttcatttccctcttgtttgggcttggaagatctccgaagaggcccatccagtcctacaggctgtgccctataacccttggctttgtgggtggggcgtggcccccgtttgcagggaatgttgctcttcacaagacagcaagtctgtctgagtccaggtctgggaatgcaagcctagggtgggaacgtggtaccttcaccctctgttctccatgacaacctgaagatgtgggccactctgccacagggccctagcggttggttcctagcgtttggctcctccatcttgtcccaaactagtggggttccctagaagaggcctcaggtggttctgtaacccagaaaccccaaagtccgactctgactgtcgctgtcctcacttgaatgcagccctgctcagacctatttccagctagtctacacagagagatagcagaacaacgggctcccactgttggcactggttcccagaaccctgcccacagcacaggccctgaacccaagagaggcccgacagggtatggaggtgtggcttcagacactggggacacaccaaggctttcgaggggacggtgctccggaagacagtttgaagctcagttatgcttggggggaggggcattccatgttcctaaccaggtacttatgcacagacatgcacacacgttcatccccccagcctcccatccccggatcctctccggaggtcctgtgcaagctcagctcgcagtcaacttgaattccatcaccaccacaccctccaagccagggactcctgagtaagtcgtgtgggccttagtgctctcgtctgaaaaatggaatggaaatatggctactgtcacaggcaatcatgtggacttcaggggttcccagcctggatgtgcttgctggcagctggctgctgtccccagctcaggcaggacgtgtgggcagctagctccctcctcgccggtaggagggcatttgcagcgctgcacctgtgcccacactggggaggaagtggctccctggttgaagggttgtggctgttactcaggggaagtcactggagcagctgtgggtgttctgggttccttcttcccctccccctcccaggccagcaggtttcctaagccatcccccttgggcacagcctccctgtcgggacagctctgcagtccattggtttctatggcaaccaggcttcctgggaaggatggggaagtcctggaggatcagcgtgggaggggtggacccctgcctcatcaggtctgctggccagggctgagtctggctaggagttcattaataacacaagacattttgctgtcctttgtggagcacagaccaagagcccgattctttcggctgcactctatggtgtattgcaaactacctgggtaggctcagtctagttttttagatgaggacttggaagtaattttctcgaagtcacagagaagcggagagaaagagctgagctttgccgccaagttttcctagttattaagagtgtgtccctctgctgggtgtagtgacacgtgcctttgatcccagcactggggaggcagaggcaggcagatctctgagttaaaggccagcttggtctacacgaccgccagggctactcagagaaactctatctccaaaaaaaaaaaaaaaaagggcgtgtggggggcgggggcgggggtggaagagtgtcatttctcattctttggtcttgtacacccagggaccctccttttcctgtgtttagacacccactttccttgagcctgcagcaccccaggaaggtactatcatcaaagccatttattatactggagcttcagatgatactactagatttaaggcctcaccccttagagagtgaccaggttggaagtcagccctttgtacaaccgtctctgccctaggccaatagcttcaatgtagttgaaggcagatcctgacccatgggcattaagttcctgcctattcagtgtgtggtaggagcaacagcctgcctgcctcttctctctccttggctacccctgtagactgcagttagggaggcctgggttgtgaggacagatgctctgaggagcacagaccctctgttcttcttctgttgggtcagcctttggaactagggagtgggaagtgaggagacataggttgtagatgtctagggatgaacacaggagaacagctgagccccgaggaggagagcaggggtagagctggcctgctgagagcggggtgggggtgtgtgtgggggagtaggaggggtaggagaaggaccttcccactaggacgagtgctcagagtgactgtcactcttagaaggatggaggttgctggggatgttctcgaggactctgacaggaaagggaggcaggacatggtcttgcaggcacctgtttcatctctacagttgggagcatgagggtggatggttagccactcctcccacttccacagtcaccgtggagatgtggaggcccttagcgcacagcgtgcaggaaaccaagcaggcctgagtggaaggggccttttccactctcctcatctgagtgaggaaaagaaaggtcgctgggagggagaacagaccctgcccagggcaaggctcatggctggagggtgctcgcctacattcactggcacttctgcatccctgccccccaccccctcgtgctcctgttcacagagggaaactgaggctgggtgtgccctagtggctcacataaagcctgcagcccctaagagttaagtgggtagagccaagattcaaagccagcatgttgccagccttcccaggaatggaatgggggaagtgcctaaaacccttggcaaatagctttggcagggaagagtcggggtggagaggccgaaaggccgtgtttctctctctgagtgtgtgttagtgttagtgggtgagtcacggagcagaggaaaactgtccctagctgagatgcttccagctcaacacagagggccatgcatgatttagctagccttgcacctggtactgaggtctggggcttgatcccatgtggtgggtaaagggctaatgagatcattctcttggtcctctctgtcaaagccaccgtggtccagtgtaggggaagtgctggggaggtggcggcatcctgtctaataactgctgtcttcactggacactgtccaagacgggatgctgaccactgagttgagggagatgacatgctttgtggcgttctgggagttagtccctcctttccccgtatgagagaggaaactgaggcacagaggtaagcagatggcatacaggcccacttaaaccactggaggtcccagatgtgagtccaggcagcggagtgtgcagccctccagctgtggcacagcagttgttttctgaattcatctctgttcagggtcctgattcttcttagaccagctcggggcgggtgtgtggtgtgtgtgtgtgtgtgtgtgtgtgtgtgtgtgtgtgtgtgtgtgtgttccgactcctggtgataccagcagagctctggtgtctcgctgtccatgcctgacacacagaggaactcagtggatgggctgtgttctgtgcagtggcctctcttcatactctgagccatatttacctcaaggttggagctaaagtcctatttcacagacaaggagactgaggctcggattagtgaggtgacttacccaagtggcacagcaggattgaatccagtgacttgtcacatctggcttcatgagaaagtttaagaatctagggtccccaaagagtagggctaaaatagaaacagcccacagctagcgttgtcatgcgtatcatggatggcgtgtgtggtgccctggctgtttgctttgtccacaccccatttacctcagaggcctgcaaatgtgcggtccccaccaaaagcacacaaagcacaggcagaaacaactgaatgtccctgttcgctatgagtgtcccacagaacaatgatgcacagtagaaaggaatggacgcctggggcaccgggcgagctgggaaaggcatcccgttgagtgggagacgctgcgcgggcaaacgttcatatgctttatgattctgtttatgctacacgtgagaacaatccagacggacctggagtgacagagctcagacccgtaactgctcgaagtgggagaactgggtacacccggggctagcacacggcagtcttgacaggtgaactcactgtgtcctcacctggaagtggacatgtcatgaatgatctccacagtcatttcagtgtggattaagatgggggaggtgtgtcagaggggacatgcgaagtatgtgctgatgtctctgtccttcaaggagggttggctgggccgggctctgcacccttgtgtggtgtccagtctgtctggagtcaggagaaagtggtggcctgggttggggatttgggccccacttgaaatggtgtgactgaaaggacatccctgcgtccccttagaggtgctgagtgcctctttatggggcttaggcagttgtcgcatcctgtctcccgccatcaggtacaggaaggaaaacagccactcatttcacacatgaagagtaagactgtgtgtcagaacctggggcccaggtctcactcgcccttcagccccagtggtgactgggtttgtggtgttgtcatttggaacaaaacctcaggacctcttctatgtacctcccctccccctggcatccacaccggctgtgcccctctgctggtgtgtttgttgggatgctctatttcattctaagactctgggcgtttgagaaggaacctgggctatctggggacatttcctggggctgcaagacatcagggacatggcgctgggcagcaggtggaaggaggaacttctaagctgtgccttggaatgagtttgctggagtgaacgcgagatgctggggtaccaggaccctgggcactggccgggtgagcaggttggtggggatgcagggctgggatgctgttcttgtgttcagtgggactatgtacatcctggtggagctctgtggaatggtctacatttgctcccatccttcagggcatccttgagatgcagagactggagctgcctggggtcagccagagcctcacttggttcccctccgcgccctgtgttctttcctaggttgtgaggactgagcacaagagagggcccctcatctcagactccagtgtgcatctcagcatctagctcattgcccatctcagtacgtgccctgtggtatggggtggcatgactcggggctgtggaagatggtgggcagatggaggctggggtagaggctgtggatgctaatggccaggagtggttcacgtccaggcagtgtggccactactatggaaagcctcattttctgggcttaatgtcaccttccctcatgactaacactctcctcctctaggttctgggcagtgatggctgtttaggaggtagaaggaccagcaggcagtgggaattgtctgggcaggtggcttaggacttaggaggctcactctgagtctctgaagtctcctttgtctcgataacccagaaatcttgtcaatgagatccatcctggtccaaatgccttttctaaaacccatattgccactccagggctgactgtaaggccttgtctgacccagtcacctgggctgtgtcatgtccatgggggccagcctggaagcatcctcctcaacccattttacaggagaggaaactgaggcagccgcagcaccatcttctcttaggccccgggtggggcctggccacattcttctcaccctacactgggacctggggtctggaagtccagcaggaacgatggctgaggccagtgtctccccatgtccctcagcagaagaaaaaatggcaggcaaacagccccctccgctcatgaagaagcacagccagacggatcttgtgagccgcttgaagaccagaaagatcctgggtgtgggcggggaggatgatgacggcgaagtgcaccggtccaaggtgagccatgctaggaagaggagtcatgagcctgcaacttccagggccctctgctcgtgtcaggggaatgctatgcccagtggcagaagtttggggacaagaacccagtgcttcttagggtactggcatagactgtcctatagacatgagtgcatcctgctagctctgctggttatccatgtggttattgacccattgtacaggtgaggaagctaagactcacatagaggggctaagtaacttccttaaggttatatcagtgacccacagaaccaggcttccagcccctgctgggcagaccctgagtttctttccttaccacctcttttcagttctcttgtctgggtaccaagggaggcaggagaggttgagcttgcattggggaaaacatttatgttaatcagggatgttctgatggcccccaggtgtccacaggagctgggaggaaggtgggtgggtgagatgctgaaactgaagacttcttccctgatgcctctgacttgtgtgtccacagatcagccaggttttgggcaacgagataaagtttgctgtgcgggagcctctggggctcaggtgagcagtaggtctcgtttggatggttttgtgtcccgggtatgtgtaaggtcctacgtgactgggccttgctctgaattacatccacactgttcattgcctcctcaaatagccctggctgtttgggttgcacagggttcccccccaccccccgtttgggttggcagtgggggtcagggtgagtgtggctgtaactgtcttctcggaacctccccagggtctggcagtttctttctgctatgctgttctccagtgtggccatcatggtgagtactgtgtgtccccgcccaggctgcaagtaggtcctgagacttagatgggggtgggtgtgtgtgtgtggctctttcccttaccccagctgctgctgtcttcactctgaggcccatacttcagggtctaggccaactcccgggacatcctgtccattactggtgtgccgtgcccccaaagtaaccagcacacatgctctgggctctgggctctgggcatcccagcattggatgctgccccaaggaggtccctagcatttgtctcacctcatagctgaccctgtgctcctcctgctgcccacaggcccttgccctccctgatcagctctacgatgcagtttttgatggggctgaagtcacaagcaagacccccatccgcctctacggtggtgccctccttagtgagtattgctgggtctccagcagcctggtagccctcttcatctgtgtctgtgctgccaccttgtggccattgctagaatgcatgtagttggttcactgccctggcaatggcagaggtagcttgggcctggaggcccttgccccattgtgtagataaagataccaagtcctggggagatgagcacctggcttgggttggatagggctttagaagcaatgtgagctgtctctggggggaaagctatagctgaagagctgaggaccggaagaggggccgtctggtctgagaagtgggtgttgtggaataagtgggttcggactcctgggctagggatcaggctgccccggtgcttgattccaacaggcatctccttgatcatgtggaacgcactctacacagccgagaaggtcatcatccgctggactctgctcactgaggcctgctacttcggggtgcagtccctgggtgagtggtgtagggtggtgggaaggctatcagggtgcaggaagagaagggcagagcactgggtgctcctacaacatagaccagtgtcctgaatccacagcccagccgttccctccaagcctgacactcaggatgcacttctaggcacctgccacttgggggcagcagactggcctaggctggtgttaggcttctggaggtcgtcagcctgcagtcccactcaccacagggatggtcgagggtattcagcctagcctagcgtcatgatgggagaggctcaagcacgtgtctgctcctgacctttgcctcccccgacttccttcacagtggtcactgccacgcttgctgagacgggcctcatgtccctggggaccgtgctgctcctggccagccgcctcctctttgttattgtcagcatctactactattaccaagtcggccggaaacccaaaaaagtgtagcaggctgggacctgcctgggcctggacctgggcccgagcagctggggacttcactgtccatgggtcctagacaggcctgcaggcaggcagggtgcacacgccttccttccctcccaggcactccacggagtcatcttgggtctcctgggattctaggagtgacagaccaggctgtggcctctgcaccccacccctcacccttgtgcagggacaactccttgccctgtgtttcttggcctctagactctaacaggcagagtctagagtaagttttagggtctgggctgagtcaaggtgagttcctctgccaggaagccctttctaggaggttgtgtcggccccagcaggggctctcagcttctccccatccagaaacccgatgtgtgagtccctcatcacacacgcacacacacacacacacacacacacacacacacacacacacacacacacacggtgtttctagagatccagttgaggacatctagcaaggggagtgactgcctcccttgggccaagttccccagcctcagcctgcacatctctctctttggcctgctggagggtactctgattctctggctggccgcctgcgtcccagagcaccagagtcccttcccgacaggctagggttaggcaatgtaccacaggcctgatagtccctggctcctagctgcccataggctcctagtgcatgaggaattctgaggagaggacaagtggggacatttcctcggcatggcctccaaggcctgcatggctacacacctggctcagtgcctcctccagatcccctcctgaggctgccccaaggcctacgggttaaagccaatagctgctcacatgcaacaacggaaggagattcaagagtctgccatcccttagcagcccctaagtgggcctctagagctgaagacacacccctggtgccaccagcctgtgtggcccctccccttggccctagctcccagcacctccctacccttcagcagcaagcacactaagagatttggcccgaggcttctcccttctgcaagggggtggtcccctatacccgaggaatctttctctagggcacctgggctcacagcctccctgggctcggttgttcctgctgccaagtgctctgtgaccatggcctttgcctagtggagggaactcagtggaggatgtgcccagcagtggccggggctgcttctgtaaccaaggtctggcagagtagcgattccctgcgtgttcaggaagggcccattgtgtatacctgcctcttgtcactggcttggtgccagtccctcagtcccacctctttactcggaccatggaccctgccactgccagctcttagtacagtcccaactaccgtagaccaggtgacatttgttgacaccattctcagaggtgttgaagatttatcatcttgaatcctccacaaatacagatacagtcccaagggaggtagtcgtagaaatggaagacgccagccctgcgcagcctgcagggacatccgccaggcttcccctcagcagcaggagcccaggtcaccctggttaaactgcagtgatacatttaggtgggtggggtcaaggcatatgtggcctccgggagacacctgcttggaaggaggcagtgatggagatagagccccactctgagtctgggctcagagtgccctgactgctctcccccaccccatccccagctcctcttgtcatgcttctgcctggcccccaagactgcctctgtcatggtcactatttattcttggtccctttttctttttgtaagaaacagtcacaagaaaacaacaacaacaacaaaaaacaaccaatgagaaacaatctgcgtggtgtcctgttttatattacaaaatttctcttaatatagaatataaaaaggggagacttgggagatacaatgataaattagctctgtttcctactgcaagggacatttacaaattccaaaatagactttagcatatgacgtgtgtgtgtgtgtgtgtgtgtgtgtgtgtgtgtgtgtgtgtgtgtgtgtgtatcagagttcctggggatgaaggtgctgggttcagaacccaggtaggccaggggcttgggacaggataatggggagcatgagccacaggtccagtcttagctcctcgcctgtcagatacagctgtcccttaggccactgctctgggacaggaagtggctgttctgctcactactggctgaggcatcttggggtgaaggaagagctcccctccattcctctgggagtacacagagcagctcaccaagccccaccaggatgacctcagacagccttgcaatggctaccagcaagctcagagggtgaagactgtgtctgtctggccccatgaggatgctgagaagctgggttgaatcagggctacttgggagcgcttcagcgtaagtgtggaaagttctggtgagggactctgatctgccctggaattgcctaggctccatatctggcttctcagtccctccctgtcccagccctgcccatctctggaagcctgggctagttctgggtggcagccgctgtggttgggctaagtcctcaacctagccatgaacttccaatcaatagccaagccatttgccttcctagacagttggagtccagtacgtgctgggttctgagtcagcctgggtcctcttagtctgggggtgcaagccagcagaggggccccctgatctggtgactcagcctctagggagcttactatggggatgccaattaagctgtcataaagacaacttccgtatagcattcagagacacccactccccggaaggccaggctgggtgaggaccacataaagaggagagaaaatgggagaagtagccccccttgcacccagacagcagaatagaacaggctatggctatgactcccaggtggcagaagggcaaaggaaggctggagttcaggtcaggctcttccatctgagagaggagagcagacacctagctgttccttccaccactgttccccttttgtgcccttggcagacataattaatcaaatttgagatcctgacagacaacactaatggattcaacacggtcctggcagggtcaggcatcttgcaactagttgctaacctagcctgcagttcaagtttgtgtgtgtgtgtgtggggggggggggtgttggttggttggttggttgtgaacctattagtctggggtgtttgtttgtgtgtgtgtgtgtgtgtgtgtgtgtgtgtgtgtgtgtgtgtgtgtgtctgttggttggttggttggttgtgaacctattagtctggggtgtttgtttgtgtgtgtgtgtgtgtgtgtgtgtgtgtgtgtgtgtctgttggttggttggttggttgtgaacctattagtctgggtaatctgagcctagagagactaacaaaataaatgttcagcaaaaggtcagaaggtgtcacggtaggagatgctgtggggttaagtctgcagacaagaggcatgaccttaacctctagaaaggagagagagtgaaggggtacacagacggaaaaatggaaaccccttctgtctgcggaggtgatggtgacatcagagcatctgaaggcaggaggctgagttgggaggtagtgagatccatccgtatgtggagggatgcaggggtgaattcttggcagggaccttgaagaacacattcaagcctcagctctgggtagaaagagagaaatgaacaatactggggtgtcttccacctgggagaacaggggtggggcatggcccacggggacaggtgatgtatcacagttggatctctgacagaggtacaagcagggcagagtggacacagtacggactgtagagctggatgcaggcagttcctggccagtttacatcggggtggagtcctggctggagcgacagcagcctggagatgaccttgtcatgcacatgctgtgtgactggacggaaatgaaagggccaccttctgatccagtgtccacacacagccaccctcagccagcgggagcagggaccgcttcgctctccagcagatggtgctgcagagtctgtccttgtgttgtgaaaagccggctccttggggcctgaggaccggctcctcctccaggatgtgtttctgcctcctggttgctctgatcctggaaatgctaagagaggtgatccgggccaagggacactccagtctgacagggccaaggagctctgaggctgatgaacctttggtctcaggaacagctggtcccaggccagccctaggtccttgtagagcccatgccccttgctttagagcctaggtgaggccccttcatgtctgtcttttttttttgtttgtttgtttgtttatttaaaaattagctctatgcttctggccgtttgggctggccttgcttccgcccctggggccagaggacagggaagagaaggggctggcttctgggcagtggtgggctgagtgtcttcaggccaaggcctactggatgccccggaagaggcacatggcaaagaccatgaggaagagctgcagagaaagggagaagatgatctggagtcagactgggtgcacgtcgaggggctgcccagcacacctcctgaggggaatcgtgattgtgacactacccggggcaagcatctgctcgccacttgggtaaaaaacaggcgttggaaagcaagtcatctgtttaaacagctcaaatctgtcttttttgggttggcagagactttaagcaaagcacaacccttcttgggcacctgagtgtgtaccgagagcttaccatgtaaagtaggtttccaatgctgttagcagcagcctttctaaccagcaggaagtgaggcatggagatgtcagagatgtcttacaacctgatttaggtcacacagcttcagtgggggtaacctagcttgagcagagacacacttccccccctccctccccccacccagcccttgcttctaagcccctgcgctctcgatagctcacctgaagctggtgaggtttccagaggttgcacttccctaaccctgacctgtggctacatcgaggcaaggctatgtgcaaatccttgaaatgtgcccagcctcaggaagatctgtgtgcctcttgttggtcttagctctcacaggaggctttgtccacttccaggagtgttggcacatacagcaggagcttaatatatgcatgtggaattaatgaatgatgcctgtacttctcctgtgacttacacagaactggtatcctgagagacaaggcacagaggaccctgaacaagggcacatcagagtgccaggcgaccagagcttccatgaaagggtccccaaagagcaggaagtgagggctgcacattaggctacctggcctcactgccccagagtgcatccctgaactgggcaggggggcagtgagaagggaatgctgagtagtaactcaaaagttgacagctactccgctacggtgtaggttctggggcactgggatgaaggattctaaagctccattgccaagtttaaaagacccctgaccatgtgcaaagtcaggactcatccagaagcccccgccttccaggcagcttgtggggtgtatcctgcaaagcgcacttggactgcagagctggggtgaggtgaggtgcctctctgggcctgcctgttcccattgtcctgggagaggcacagatccgtagctccaggccacaagaatggctctagcagcagacgtttgcagtaggcagcggctatgaatctgggaaataggctgagcgtacagacgctggggcttcctccctcccagggcccctccactcacctcaatagccagtactccaatggcaaaggctccggccaggtagacataggtttcgaaggtgttgaggatcactgtataacagccctgggaaggaaaggccagagatgaagccacggtatggaagtgtggtctgcagtcaggaccactgtcagtattgaagtccctggcatttggcctcagggctcagcagctgcaagctggcatttttatactgatgtgggaggaggaagcatctggtcagtggcagaatgtcaccaacatccctccctctgccgcatccagtccccaagacagtcccaaggctaactaagccacagacctagactatgaggagatgtccaaacactcaggcctcctggtgctctgtagaagtgggggtcagacatgcagggcaaagctgaatgggatggatctcttcaatcagaatgtcaaatggtgccccagccccaggtgggacagtatctcacagaggtgcacagtgccccaccaagtccctctcttgacctgcctggctgctgagggattgacagtccccctccccaggctcaaggccaggcagcccatcctcaaacattgctcagctcttttcccacagcctcacaggagcagctgccttcatgtgactcatgtgcctgcggtcccctggcactgtaggtgacagagccagatgagccaagacctctcccattgggccccaaagacattgtactctgtgtccactgtaccccactcccatgctggccacaggtaaaagtcacacacacacacacacacacacacacacacacacacacaccagtcagtgttggggatcagaccactgagccatactcaccccccagctctgactgaaatatatgcactttttggagatgggatctaggctacacttgaactctgtatagttgaggatgtccttgaacttctacccctggctttatcacctgagtgctcatattatccagtttatgagggattgggttggaacctagtttttgtgtatgctgcacaggtctactggctgagctatataatctcagccttttgaaacatattctttaaaaaacaacagtttttttttttcttttatgagcacctgaatattctttgggcccaactagaggacttccatgtggactggttggtggtggggcaggggtaggaactgtgcccatctatgtggggtatatattggatttcaggttctgatgaggctggggtcttgctgcttcctacatagattcccagtgtctttggccatgtggacctggggaggctatatctgagcacgcagacagtaagacctgatcagagactgcggctacatgggagtcaacgtgtcttctacgtggagactaactaggaactgggcaagggagaccccattgtccctggagcctcatagagtaggtggacatattctgcctagcacaagtgacctgagccgagcagaaggttggctggtggaaattccccggtgacagggaagcccttggcatgagtggacagtgtggacagtgttacctacacccagcatccctcctccagggtcttactaggttctatgtgccctgcatcatttggttctctgtgtagcccctactgagaagtagctcatctgtggtttacctccttgcaaaatgggagagagcaggtgggtggctccttcgaggccacacatagcaagggaagcccagattcaaagaggggcctgatagttctttccctctacatagagggggtgggaactatattttaaaatgcctgtcctcatgtggccaagcccctccatcggtgcctggagttgactatgccctgggtgtcaccccaccataaagcatccccatctgtcacagggaatggaacatcacttgctagatgcctgtcatagcacctccgatgtccagctcctgctcacagtcaccccaaaactaactagacatagggcagctggtcctgggcagcaacccctacattctcatcactagcatcccatcttaggttccaggatgagcaccccacctcctacctgggactcctgactagatatttcaaaggtacttcactctcaatgttccccaaacttcacacaccatgtcccccaacccagaaggcacagaaacacctttgtcacatgcctggactcgcattgacgtctgttacaaggccagtaattcacatcaccctcctcgggactgctgctcatgtagaactgtcttgacttcccagtcctacagcagccaaagtgccaacctagccacattcgtccccaaaggaactccatactctagaagtctggcttgtgccagtcacaaatgtgtcctgggctttgtgggaggcagttctggagataacccaactggagatggtctcccagtgggggctcctaacagaaagtatggctcagcggggatgggtgtgggaggaccagtcctgggagttagtctcactgggcctgaagaggctctgtgatggagaatcgatatggctgtgtggtcctcagtgcaggagccagcaagaggatgctcacaggggaaggtatcttgcggtagaagttcaggacttggggtcctggtcctgcattctggctgaagttgggggtatagcactttctcagaagggtgtgactcagtcaccagagtgtgctttcccttggttaaatgtgtgtggttccatggcctttgcgagagagcagaagcaagcttctgcctcactttcctgggctgtggcggactttctccagcagagtggtaatgaaacagggaggcttgactttccctgggcaggtgtcagcctaggcccgtcggcaatggaagcgtgaggctccccatatctttcaatccttcccaaattctactcgctctaaccatagatccctgcaatccaaaccttcatgcctgctctttccattcacatcccggggcccttcctcctcatttctgtctctttcccccagggtaggaaggcaggatgtgtgagagacactgcgctctggcctatcctagggaaggtatgaagtcaagagctgagctcttggtatcaaactgagctcatgggactaggtctcagcccagtaatgccctcccttggagcttcgagtaccctaagctctggcccatgcacactctagcacttcattcaatctgtcttcactctcagaaccaccgctgtgggcaaggatcacttcattcactggatcaccatctaccacctctccctagaccaggagccccatggaagctcagcctgtcccttgtgctctgtcagctccacagtgttttgaattctcccagaagtctgaccaaagaagaaggccaggtgtggctctccttctcatcccttccctcttcccatctgccacgcccaacctctccctgcttctctttatggacaaggggggttggggtagtgggggtggggatggtcctctggccagcaggacggaagggaccaagggtgaagtggagctgtgctccttgttgagggggacaaagctgagacctctgtttctcttagggcgaaggctaagaggaagtcctcagatttcaagaaaagaaagaactctggatgcttccctagttatctagggtcaggtcaataaaaatctcctcctcttggatcaagaagtgttcttgctgggcagtggtggcgcacacctttaatcccagcacttgggaggctgaggcaggtggatttctgagttcgagaccagcctggtctacagagtgagttccaggacagtcaaggctacacagagaaaccctgtcttgacccccccccaaaaagaagtgttcttacttggccagagtaagcttcctcataaatagagtatatgcctaaggagtgcctcccccatcttatttggaaaactcagcctggaaccacagaccaaattctcaccccagcctgaatccaactcatttcctctgtcagtgtgatcttctcacttctttggttcttagaggccaaggtagcctgtgccacagccagaattgtttacaaagctccagcccaccttcagaccctctgggcagacattgcttcccccagctttgcccatatttgagaagtgtctccccgcctggggaacccacctgcttgtttatgaacggattccgtcccagctggcactcctccctgctcagcaccactccatctcgagtctggggttccctccgacagcaagccttgggcacctcctcagtgtccagcgtcagcagccgaaacacggaggccagcttgaagtcttcaggtccgttgaccccacagcagccaaactaggagagagccgaatgtgggagctagtgagggactggaggggacatcagcctctgccagggccaagatccctctgccctgcatatgactgcggtaatgacctgtgttcctgagcttctgggtcttctctgtaagagggacatggccgtatgttccttacctcaccagcacttggtaagcagtgcacatatagatgctatgattttatattgtgctgtgctatttattatctttactccggcctgtgtataactgttcatatgcagatgtgtgtgtgtgttgtgggatcatgtgaacatatgagtggaagccagaagtcaatgtcaggtgtcattccttaggtgctgtccatcttatttttcagacagaagctctcactgggacctggggtttgtagattaggctaggctagctggccagtgagtcccagggatgtgcctgtctccacttctccagtgttgggcttataagcatccatcatcgtacctgatattttacatgggtgctggggaccaaactcagttcctcctactcacacagcaatcactttaacgactcacccaccccctcagcctctgtactgagtatcgctaacatcactcacaatggtactgcgtgaggacctaagtcaggggcagtggactgtgatccactagccttgacagctcggagtgctgtgcaaatgacgatgcagaggtcaagagtaggatcagtgattcttgatggattgttgatgcctggtccaggcaagggactaggagggctctagaggacaggctttttcatgtcacattatggctctgagtgttcacggcatcccacgataatatggggaggggcactcactgtgatcatgactgaattccaggtggcagagaaaacatccgtatcgttatcgccttggtagtgcttggtaagctccttggtgaagaactctcgggtgagctgaggacaaagtagagggtcctgagtcctcccagcctgtctttcccaaggtgatactaagctgttcattttgggcaggcaccctgttcccaaggcttggaactttggtgtgtctcatcataggctgagagaagcgtgtctgtatttacgggctcatctaactccaggatgggacacactgggaaccctgctcagccttgcagctctccacagaggatgagtgtgtgggtgtttgggagctggaggacatgattgcctgtcattctgttcttcagaatcaacagtcatggggcccaacctacaggaagccacagtgtgggtaaagagggatcccttcaatcacccatatctacccgctatgttctcaaagccactgttctcaacagcttcctcaggctggctccttgtcccaggctggcccatgtcttatccttccatccctcctgaagcccatctgtctgtggtacgaggccttgtcctctaggctcaggggaaggagctggctgaagcctgtggtgtaggctaagcagggagaggctggtagcctagcaaggcacacagcatgcccagactgggtatatcctctccaaccccatgactatgtgacacccatcatcaggccgtcactggggttggatagagattctaaaaccaagctggagcctgtaccaggtgctccaggagtggggacccttaggcacccctggtcggggccttctggaattacccctataggagaccccacttctctggaccccaatgcattcctgaggtgcaggttatgtttagacccaaggccctggatgagac

SEQ ID NO: 1681 - DNA, 2480 bp, Mus musculus
ggcgagcccagcagcgccaggagtccagcttgccctgccctgccctgccctgcctgcctagcgcggcgccgcgatgtgagactccccgggccggagcgtccgcagggcacgccagctccgcgagcgcagcaccccgcgcgccaggaacgttgtgaggactgagcacaagagagggcccctcatctcagactccagtgtgcatctcagcatctagctcattgcccatctcagagaggaaactgaggcagccgcagcaccatcttctcttaggccccgggtggggcctggccacattcttctcaccctacactgggacctggggtctggaagtccagcaggaacgatggctgaggccagtgtctccccatgtccctcagcagaagaaaaaatggcaggcaaacagccccctccgctcatgaagaagcacagccagacggatcttgtgagccgcttgaagaccagaaagatcctgggtgtgggcggggaggatgatgacggcgaagtgcaccggtccaagatcagccaggttttgggcaacgagataaagtttgctgtgcgggagcctctggggctcagggtctggcagtttctttctgctatgctgttctccagtgtggccatcatggcccttgccctccctgatcagctctacgatgcagtttttgatggggctgaagtcacaagcaagacccccatccgcctctacggtggtgccctccttagcatctccttgatcatgtggaacgcactctacacagccgagaaggtcatcatccgctggactctgctcactgaggcctgctacttcggggtgcagtccctggtggtcactgccacgcttgctgagacgggcctcatgtccctggggaccgtgctgctcctggccagccgcctcctctttgttattgtcagcatctactactattaccaagtcggccggaaacccaaaaaagtgtagcaggctgggacctgcctgggcctggacctgggcccgagcagctggggacttcactgtccatgggtcctagacaggcctgcaggcaggcaggacgcacacacacacacacacacacacacacacacacacacacacacacacacacggtgtttctagagatccagttgaggacatctagcaaggggagtgactgcctcccttgggccaagttccccagcctcagcctgcacatctctctctttggcctgctggagggtactctgattctctggctggccgcctgcgtcccagagcaccagagtcccttcccgacaggctagggttaggcaatgtaccacaggcctgatagtccctggctcctagctgcccataggctcctagtgcatgaggaattctgaggagaggacaagtggggacatttcctcggcatggcctccaaggcctgcatggctacacacctggctcagtgcctcctccagatcccctcctgaggctgccccaaggcctacgggttaaagccaatagctgctcacatgcaacaacggaaggagattcaagagtctgccatcccttagcagcccctaagtgggcctctagagctgaagacacacccctggtgccaccagcctgtgtggcccctccccttggccctagctcccagcacctccctacccttcagcagcaagcacactaagagatttggcccgaggcttctcccttctgcaagggggtggtcccctatacccgaggaatctttctctagggcacctgggctcacagcctccctgggctcggttgttcctgctgccaagtgctctgtgaccatggcctttgcctagtggagggaactcagtggaggatgtgcccagcagtggccggggctgcttctgtaaccaaggtctggcagagtagcgattccctgcgtgttcaggaagggcccattgtgtatacctgcctcttgtcactggcttggtgccagtccctcagtcccacctctttactcggaccatggaccctgccactgccagctcttagtacagtcccaactaccgtagaccaggtgacatttgttgacaccattctcagaggtgttgaagatttatcatcttgaatcctccacaaatacagatacagtcccaagggaggtagtcgtagaaatggaagacgccagccctgcgcagcctgcagggacatccgccaggcttcccctcagcagcaggagcccaggtcaccctggttaaactgcagtgatacatttaggtgggtggggtcaaggcatatgtggcctccgggagacacctgcttggaaggaggcagtgatggagatagagccccactctgagtctgggctcagagtgccctgactgctctcccccaccccatccccagctcctcttgtcatgcttctgcctggcccccaagactgcctctgtcatggtcactatttattcttggtccctttttctttttgtaagaaacagtcacaagaaaacaacaacaacaacaaaaaacaaccaatgag

SEQ ID NO: 1682 - protein, 245 aa, Mus musculus
LIAHLREETEAAAAPSSLRPRVGPGHILLTLHWDLGSGSPAGTMAEASVSPCPSAEEKMAGKQPPPLMKKHSQTDLVSRLKTRKILGVGGEDDDGEVHRSKISQVLGNEIKFAVREPLGLRVWQFLSAMLFSSVAIMALPDQLYDAVFDGAEVTSKTPIRLYGGALLSISLIMWNALYTAEKVIIRWTLLTEACYFGVQSLVVTATLAETGLMSLGTVLLLASRLLFVIVSIYYYYQVGRKPKKV

SEQ ID NO: 1683 - DNA, 39556 bp, Homo sapiens
cagttaaacaccacaatctctagaaacctttcccagagaccctcgaagctgtgagtctctcagcacctgccaggcaccacatttctcccatgggtcctgtggtagaagaatgtgtcccgtggtgattcccaagccaactgtgtggaccaccttaacctctgattcccagccccagggaaaatcaggagattaacaatcagttcctttgggctggtaatattccttccattttacagatggagacactgaggtcctggatatttaaaaaaacaaaaacaaaaacccatatgacactctcagggagcctgggagtcccagagcttcagtccgattttctgcagtgactcagggcttagacaatcattacagcagcgattactccttaaattggttatttttcactgttgaagctgttgtgtgggccttttttttttttttttttttcagtttggattcaccaggctgggggagggagagattgaatgtgaggcaaagcagaaggaagagaaagaaaaaggggaggcgggaaagccgggcagcagagaaaggcccaggagtctttgggatttctcaccatggggtgggggagggggaggctgccccggacccctggggaggcaggagagagggaagtaggagtgggggcagggagatgacagcaggtggtggggcatagttccgaggttagctgcagccatgggcagttctaatcagcttcttagactcctgggatcagtgcctgggctaagggtgctgtgtgtgaggttgggggtgggagcgttgagccacctccactctcacagtctacccccaaccatctcccctccaccttttctcttcccacactgttcagatacctgccgtgtgcttggcactgtgctaggcacaaaggcatagcaggaaacgagatacagccctgcccttgagtagctcacagccagccctgggaacctggaacccagccgtcaaattcactacagggattggagggagctactggggtcagcttgcgggggtctatggggaccgagggatgtggcccaacttcggcatgaggcttgggggatgggcgaatgggggagagtgggtagggaaaagctgccagaggaaactttgtttgttttttgttttttgagatggagtctcgctctgtcgcccagactggagtgcaatggcaagatcttggctcactgcaacctctgcctcccaggttcaagtgattctctcatctctgcctctccagtagttgggactacaggcatgtgccaccatgcctggctaatttttgtatttttagtatagatggggtttcaccatgttggtcaggctggtccaactcctgacctcaagtgatccacccgccttggcctcccaaagtgctgggattacaggcatgagccaccgcgcctggcccggaaacattttagctgagataagagaagcatggtgaagagctggcagatgaagactggggtgtgatgggtaagaaaggtcaagccgaaggaacagcagggacaaaggcaaggtcctaacccgggacagagcccggaacaagaggggagctaggagtagcaactgctcagatgtctgtctcttgcactagattatgagcttctctgattcataactggggttgcattcatcactcgttttgtggatgtatctatgtctgtacgcatgcattcattccttcatttgttttagctggaataatctaaagcttattatgaatcttgcaggatgaagctgtagatctatgatggcctgtccccttaggctgccaagtcctgctgcacaggctgtgcactgcaccactccatctgccataggtgtagcaccctgcagccttgctctacatggtcattgataagtagtaattattctctccctctctgcatatataatccccattttctgttgtgtacactgagagaagggaggagtcctgctcgagttctcatggcctgggggagacccacaggaactctccctatctcagtatccccactgacacttactttctcagtaggcctagatagttgatctgagagcttccgggtcagatgcccttcctcactccaggaccatggaactgccaggcagagtgggcttctgtttactgccttgggctgaaaacacatatcagcgattggcaaaacacagggaagttgcagctcaacctgttagactggcaaatgtatgctatgcccttctcttactgtaaggatataaaacaatcacttatttatactcaggaaccagaacacttgggtcctcctgcctccccctgctcagccccaccctgaacagaggggctcccagaatgccctggggcctgtggcaatgggggagagaatggaaggggaaaaggagagctgccctgggacctttacggtggagggcagaaacattattaagtacctgctgcatgctgacccttaactgtttttcttctaattatcaaaatagtcctgtgaaagggagtcagaaacccaggggacagaaggagcacggtttgaatccaggctgtgtctcttatcagctggagacttgggagagttacttatctttttttttttttttttttgagagttacttatctataaaatggagataataacagcaactacctccacagggccagtgtgcagagttcacgaagccacccactgcaggtgcttggcacagtgcccagcatatagtaagtgttcagtaaacactaactagcatcatgagattcggggttgctgtgagccctgttgtacaatggagaaacagaggcccagggaggctacagaagttgccagaggccacacacttaggagttggcatagccagaggtgagtgtgtggagttttgaagggaaggtctgaagactgtcactaagcattaaatccgcctgaggcttcaaaccttcactttaaattcacccagtgctgtgtgcccagccttgcactgaggggtgagatggagtggctgagtgaagaagatgtgttaggctccttggagccaccatcccagagcacgtggcctgatggggacagacagaagatagtagttcccatgaagcagtgtggcagatgctgtcaccagctgctcccagagctggaagaggtagcctccaaggcttcctaggatgtgtggggggtgtgagtgggggtcggggagggctgggaaggacttctcagagatgcctggtagagggctcagcgtttgcaaaggccaggagggttgaagtaccacagcatctggagaaactgtggcaaaaaccgatccgtggtggttataaagaccccttgtggcatccaagggaaaaaaatgtgggcttcgaagctgacaaatttggggattcaaaaccctggtacatgaagccagccctttctgggcttcagttctccattttaaaaatggactacctcacagaggttgcccacagaagtcgcgcaaaaagttggtcatttctctctctcccccatcccagggtgagagtggggcaaggatgggcggtggtgagtggcggaggggaggccctgggtcagccctggggtcctctgggtctgcagatctgcctccggggtcaattctcccgggtgggcggaggtctgcgccctgccaaaccggtgttaacccgccccttgaccgctgaccggtgcgtgggaggaggagagcaccaggtgaagggctgatgactctccagcaagtgttccctccatccgccgccggctcggatccccagagacccggatcgcagcttccctgctggccgagcccccagcacccgcggcgcgccccagccctctgctcctcctcggagcaattacataacgacgcctctggtgggtggcggagaggccttctttgttattgcgatccgcctcggcagcggccccgctgtattaataaaccgatcactcaaaacgccagcctgggctttatgtatgtagatttgggttggggcgcctccgagggaattatccacgctgcccgctcctcacccaggagggaaggaggtggaatcccttccctcccctcccctctggtctttcaccctgcccttcagctcagagtccctcccccacccaccttgctcagcagcccggtcccaggagggcaaacaagaatattccagaatcaaaaagtgtgggttccaggcccatcttcacttccctgatgggtgatagctggcaaatggaaactcattagccttacctgtaaaatgagccgaataatagcaaagtgcccatttaaattagataatctaggaatctgctttgcaaattctaaagcaatggttctcaatctttggcttgtatcagaatcacgtggggggctgttggacgacagattgttgcccctgtgacttcctttcccagagtttcagttgtctgaggtggaaatgagaatttgtgtttctaacattttcctgcccccaagtaggctttgagactcatacactctaaagagatttataaactagaatctatttgtcagatgttcctgtcggtccgcaggtgacttactgtccccaaactgtatggcttcactggggtgggggtggtccaggagtggcaggccttacaagggatcagcaatgcctgccctggccagcggcagcaccagaaccacctgagctctgggccagactgccagggttccagtcccacctccctgctttctagggtgtgatcttgggtaagttatgtaactcagtgggcctccgttttgccatctataaaatgggactagtaatggtaccaacttcgtgagatttgttaggattaatgacatgtaagattctagaccagcgtctggtacatagtacgggctcagaatgctattttttgaaataatgataaagcccctggggttttatcattggacaggaggcaagtgaagcggtggccattggcctagccggctgcccagggtccaagactatgatcccacagcccagaatggctgctctgggcactcactgtgaagaggtcctgggggtcgcccaagatgagggtccaaaatctgctactcacttccctgcatagcaattcttttcttggccagggctcagcactctgaaaatctggacccagcctgaggttcttaagtcagctatgctgacaaggggtactccatactccatctgccctgagttttggaagccgtcccttcagtaccagcacagagcaacagtgtcccaggcctgcgatacaaggtccacagacatctccccgactctcccagctggtggagggtggatttcttgcagatggccacatgcacacagctcaccgccatttccacatgtccattcattaattgagtcaatgaacattcattgagaactgactgtgagctccggactcacatgtactatctcacttaaccccccaggtaccctatgcatcatcatgattttcttctttccatttggcagatgaacacgctgaggctcagagacactgagttacttgcctaaggccacagagccggttagaagaggactaggaccttgaacctaaatccaggatggttctagtggctaaatcccactctcatactgcctccttgagccctcccccacaggaagcaggaaagggctggccatggtcttctggtcccctagctgtcatacactttctttggggagatctgagcctcatttcttccacccccatcctgatcagttctctctcccacagataagaaactgcttgacatttcctggtcctggtgtagcaacagaggtggtggggatgagtcactggagggaagcagctggcagttgtgtggggtcggggaaggagggctggtcagtgctcactctggaggggtgggggcaggaagcactggggaggcctgcctgggagttcctgagctcccagctgctccttccagtccccaaagctatgtgtaacagagttctcctcaccaggcaggttcacagagaacgaagctctggaggaaatgagaggaaaccaggaaggggaaccagaagcagttgtgaaagcccagctctctgcctcagtccttgtgttgtgggatggaggctccttctctctgggttttgtgccagcttcaatgaaccctggctagacaactctcaccccagagctccctgttccagttgagaatgcaccagcactcctgaggccctctccctccgctcctcccaggctgccgcataataacaccagtggcactgattgataactgtcgatgtgcctgccccatgttaagggcttcacgtgcagcctctctgctaaacctccaataactcccaccaggtaggccctgttattatcaccattttacagatgagcaaactgaggcctagagaagtgaaatcactggcccatggtcccataaccaggacttgaacccagatctgtcaggtccaaaatccctgggctcaaccacaacaggtctctgacaacatcatgttcctccacacgtgcccatcagtgctgaaacctttcccctggccccaaccccaaagactaggcccaacccccgctccgcaggcctctctcctgcagtcccaggtgataacagtagtctcactccaagcatctttgaaatccaattacatccccattcttcctcgtccatagtggtttctggctgcagacactggcaatccctgtgcccaccacaccttcctgcaggggcacaaacacagacacacaggcgcactcttaagtgctcactcacacctggccaccaaggaggtgttgctgcccctgcttgtggagggcgaccagggcagatggagcccctgctgctcccaggttcctgtgggagtctggaggagtgaccctcccacccctgcaacagccgctggctgcttcctggctccatccccaaccccactcccatccccacccccctggggccttgagaggaacacttcaccaaggtaagaatcacaataataatgtcaataataggaatcagcatttccagtttgcaaacctttttcatcgaatcacctcacttgactctcacaagttctatgaggcagatatttttatatccgtgcaggcgagggtcgtatagctacttaggagcagagccaaggtcctagccgacttatctcactctcacctagaataatgatgactcctcattgttaccgtgcaccaagcatctattcttgcctgtcgttaggggcacacttaatgaatgtcaatgttactcctcacagcagcccagtgaggtgagttttttttttatgcccagtgtaaagatcaggtaactcagaagagttgagggcagaatggctgcctaagggatgtttctgaactggacacatcactttagaaaagtatataggggccgggcgcggtggctcacgcctgtaatccccgcactttgggaggccgaggcgggcggatcatgaggtcaggagatcgagactatcctgactaacatggtgaaaccccgactctactaaaaatacaaaaaattagccgggtgtggtcgtgggtgcctgtagtcccagctactcgggaggctgaggcaggagaatggcatggacccaggaggcggagcttgcagtgagccgagatcacgccactgcactccagcctgggcgacagaacgagactccatctcaaaataaataaataagtaaataaataaatgaaaagtatatagggaggaagacaataagagcctctaatgggtgctttctggagagcggatgcagggggttatggatagagccagctgcttctcccctggtccccctccaagcactttgcctgttatcttgagcggttactgttgctgctgttgactatttgtgcagtcatctacaagggggctgtgaactctccaaggacagggacactgtcctgttcacccctggggccccagcacatagcaccttgcctggcataagggtgaggcactgtcaggatggcctcgttcacaaaggatggtggggcagccttggcccagcctgagctcccagcctccccagcttccccgttgataaggagactgagagaagacagacacccagagggcaaaggttatccactccaaataccacttaaggtgggaattcttcctctgctgtcctcatcaacccttccctggattctgcttgcatgctgctagtgacagggcactcattcatgacaactaaggcagcctcttccatgttggaaaacttggagtgattgtgacaaaggcctcccactgatgtatgatcaggctggctgggattacaagcacagaccctgctgctagtctttagggttacaccaagcagagcactggcaggtgtccccaagtctgggaggacattgcacatgaatgacgctgggggccctcccttcagcaatccagagccctgagtgccagaaaggcagaagagggagtgacaaatgaattcatcaacccagcttggcccagctctgtaaaggcagtgaggtgagactgagttgttgcagaaattactatagagccttgagtcagatggctccacccaacacaccttaaaaataatcctcatctagagtcacatactttgattgattgattgattcattcattattggctatcactgtctaggtgtttggctgggggcagtgtcagtggcactggggcatcagagtttatctaccttagtaatcaggacagtttatattcactgagcacttactatgaaccaaggactgttctgtttacttccttgccaagggcacagactctcctgcccaatcccagctctggtgaggacagtgggagcctgcatggcacagagtccatgcacagtaaacatgagcagctcctattaactctaaatctctacagcaaccatagccggttcttactattggttgctctaggtgacttactttgtccaaggccacacaggcactaaaaggcagagtcaggatttgaacctaggtgatctggttccagagcctgctctattaaccgttaaggaactggtgcagacagaaccgagacctggagtcagaatgcccacctagctagatgcctgaggcagccactcacctctttctgtcttatttacttgtgaaatggagcatgtcatcagccttgccttccttttcccgcagccccccaccccggttcctggcccactgtgaccatcagatcagatgaaagagatccaggcatttctctaaggagagcacagggtggtgggggttggggtgggagagagcacattattttcccaccataaggggttgaaggagcccagaatttgggggtggggccttgtctgtaggagcctggttctctcaggttgacacgccaccagagagcctccatgacccccaaccctcatcctcaccccagccccccataggatgtgtagagacaaaaggtttgacaactgtagcgccaacaagcgtcctagagccccagataagatcctagcctcctgacagcgcaactgacagcagcatctctgaggctggattttagggtggagtatgaagaaggtggccgtagtgacagtggggtcatgttatttggtcaagtcacaccaagcagggagagagaagggtgggcctaggctggaagcctgaaggctgagtgaactcaaactttaacgaccatggcctgtaaaatgggactaagcacagcgcccttatgggttgctgtgaaaatcaaatgagttaatacttgtaactcctttagcatatggtgtctggcatcagagagtgcgcagcaaacggtgactattgtcgtgactgtgttattacacacttgggtatcaccgccagccaaagcagtcccttccatttcaggcaccggcctgggcccgggagacaccgcaaggctatttaagatggtgtggtttgcccatctacgttgatcgtcccaagaaaggggcaccgtctgcagaacttgccaggaaagtcatcctgggcggcgcggccacgccagagtctccccgcgcggcttcctcccccggcgccttctttcctcgcgcgtgcgccccctgcaggcggcccccgggagagcttcgcgggggagccgtgagcctggtttccccgccaacccccattcccgccgccccggcggccaccctgggggcgaggcagcccggcgcgtgggaggggacggcgcgccattggcttgtgcgcggaaccgagaggagggaccagcgcgggccgccagactcggtaagccccggccgcgcaggcgccgcgcgcagtccagccggcccggccctgccctgccctgccctgtcctgccctgccctgccctgccctgccctgcactgcccggcccggcacgggcggcgcgatgtgaggcgtccgagcccggagcctccgcctggcatcagctccacgtagcccagcgccggcacgcgcgaggcccgtaagttctgctccccgccgccgcttccgagccgcggactttcccctcccgccgcccgccgcctgcgcagcgcaacccagcggggctcctgcggccgacgggaccgcagaggggcggccgggaccccgcgcgcgctaaccgggcgccccgggacatctcggcacccgctgagcccgctgggaccccagggggtcgcctccccagctccccaaggcgccgtcccgcagccccttccgtctcccctgcgcgctctcccctcgccgcccctccctctgactcggtttcccctctcccccggctccgcggtcgccctcctcctggactgcttatttcgtcctcggccactgcctctcgggctcgagctttctgcttcggagcaggagagaaacggagcgaaagcagtttctgtctccccggggtctgactcggtcccccgcgctcggttctctgtcccctccccctcccgccattgttcccggcaggaggagtgcgcggcgcaaacttgcgagttcccccagtctttgcccccgcagggccgcggacggaggtggtggcggagttcccgctgcccacaagtctggcccgaccttctggggtgggggcctgggggcaggggccctgggccggagaacccggggccgcctaacggctcggagctcaccgccgggggacaccggcgctgaggcctgggtctcagaaagtgggtgagtgtctggagcggggacatcagggacagattgcagggggaggggcgaggctgagagagtcccccgtccccaggctggaaaggggcgggcagaaacccaggccgcgccttagcccagttagggggtgggtaggggacgcacaggtggagacgccccccactctccccaaagtcgcgcgatctgcaggaagggtacagtgtggggccactggccgggcgctgggtgggttagggcccctgccgtgggcagaacactcgcacctacccgggggaggctgtgtggaggaagggccagaacgccgcgcccaccccggcgcgccccgctgggcggggcggggcggggcgctcgccttgggtcccctcgctctaccttccttcgccctgacccagtctcgggcttccgcctcttcctggagcccggggggagtgggtttctccgccggagagatggaggctggggcaagagcagcgcggaggccaagaacccccaggctcctccaaagcccagagcggctggccaaggccccctcaccgccccactaccctgcacttcctgattggtttctttcaaacaaacttcttgacggggcgggcctgcggggagaagtcaccggggctgcccaccccaactatgtggtcccttggacctccacccctgacggcctgtggagaggggaccaggatctgcggcccgcagatcccagggacgcgggggtcgttttgttgcagagccaggagggggcactgtccgctccttagcctcagccccagacttcgagaaaggagagaaaagatttttcttgttgggttgttaggaaataagactattctccaggcttctgttgtcccatctgtaaaatgggtcgtcttgttcctgaggccccctctgtccccaccatcccaggaggcccctgccatggccgcttctttcccagtcacatgtcgtcaacttcctccgtgcttccaaatttggagtggagggctaaggccgaaagccccttcacccatgtccagctgtcatgacctgccagttctaggactgcgacctattttctgcacagctctgcctccaggccccttgtggcttctccagctcacacccagcctcccaatttcttttgatagccccacctctgtgggaagaagggcctgcccctcttggggtatgggggaggagggggctggatttaacaggaatgccccatagtcacacagtttggggctgttctttacttttgcttattgaacaaaatgtttgtgagcattacaccaaaaatggcttatggagcaaagtgccagggacagtttcaggcactggggagacagctgtggacaaaataaaaatttttgtcctcatggagctgatgcttaaaagcagggggcagggggaggcaattccctaataaaaacaataagcaaattatatagtgtactgagaggtgaaggggaaaagttgtgttgggggtattgaggccagggaccgggttgtcattttaaatagggtgtcagggaggtctccctgaggaggtaacttttgagctacagccttgagggagatgagggagtgagctgtgtagacagctagagcacagcccatgcaaaggccctgaggctggaatgtgcctgccctgcagctagcagggagtgaggggctgaggaagagtgagtgactgagaagggatgaattcctcccctttcacaggtgagggaagtgaggctcagagacagtatgtcagtcaccccaggacacacaggccaggagaggcagctgcagggcggggtgcctgatgttctgactcctggtccacgatacctccccggcaccctgtgtctcactgtttatcctgctacactggctggacccctcccagggccagcgcagcatcgtcctcctgccccaaagtgacccttgctctctctcatcccacttccttcctatgaccagtcccttctgagcacccaactctgacctggcacatgatccctagaaggggacctgctctgaggcagatttggtcaagggggcaactgaggcaaggaagtagagtcttctagtctaaaaataatgagcagcattattattgaacattaactacaaaacaggcgctgttctggatttttttggtgcatcttctcactggtgagaggttggtgtcattattacaccccatttaacagatgaggaaactgaggcccagggaggcagagtcactggcccaaaggcatacagctcatcagtggtagagccaggatggagcacaagccttttaagtcatgagctagtcctttaaccactaagccagcaccccaggattggggagacactcagtcctggactatggttgtggcccatcttatcctgcgaaaagggcagggacccttccacctgcctcccccaactcacccagaagacaaatcaccgcttgcttttgaagaaacgggctcaaaatgtggagcatcccttcgaggaagctcctgtcctttcctctcccttcctctcccaccctcttctcccctctaagttcctgaacagccacggggtgggggaggggcatggggagagtggggtgcaggtcggagagggaggtgcctgctgcattctcaccagacccctagcccgataggatctggaagtcaggctgtcctgatgacgacaccagctgcccttgagggccctgacatggtcactgggccaaggggcaggctggcctattctcagagtcgaaaaggacaggaattcttcatgttctgcccatgtgaatgaccgtcgagacaggaaaaacctcccagtgacttctgagcggtgatggaggccatcagagggcctgatccccttgcccacagcagcagcttcagacccccgggggaggagcccaggaatgcctccttcttgccacctgctctgccctgacctctcgccctcttcagcacagtaaggaatgttcatatttgtccctaaagctttggaaatgtttctgatgaaaggttgggctttcctctgcctttctggaaattgggccccttcaaaaagaaagagtaggaagataggacctgtgtgccagtccaggctgaggggtggcgggtcttggggatgaggcagcttgagctggggcccagcagggacctggagtgtggccgctgtgaggcagggctgggaggggccctagagaccacattctcattttcttagacaaagaaactgagccccaaagacagggcctggcttaccagtgatggcagaatctgcctgtgacctcagctgtcctgtctccgagcccagtgactcaggacacactgccaccttccagctccaggacaaaccttccactaccagatctcagggcacatgttcctggaggttcttggaaatggggcgtggaacctttctcaactgcagagctgtgtcatggagacgggggttgccactgccacgggactcgcatcctgcgcctgcctctcccggccagttccgctctgtcctcactctttgcagcagcctggacactgagcccagtggtgatgctgagatgatgaggaagacggatgctgcagctccgccctccactggctcaggatctgcttgagagacaagactgactaaggcagccccagcctttggaataatgatgctctcgagggatggcctgatagcaagccagctggagccagccaaggcccatccaccgggtagcctcgcctcagcttcctccttagctgtgggcctccgatgaaacctgcaccccagaggccgctgtgaggatgtcagtagtgcagccgctttcataaagcctcttttgtgtcccatgacttctagattagctctctagcccccggacagccttgtgactcagggaccaccgccccatttacggtggaaggaagggaggctccttcaaagaggagtttgtctgcccaaaggcacgagcctagtagtgcagagccaagatctgaacacaagtcccttagtccctaagcctctccagtacagccattgacaagtggattcactgcctgatggcccaggcaatagattctgggctaggggatctctagactccatcctgcccaaggggccgacggcagccctgggagggaccgcagctggagcggatgacgcaagctctggaccttctattccgtcccgccctccagggagcagagattctttctcctgcctccccttctctctggccgggggcctgaggctctggctctcactgccagcaccccgccccccaactctgtgttgccctgtcccagaccccatttccagctattttgtactaaagcgataacagaacaatgggtctccctgcatccctccccaagtcctgctggagtcgcagggccttaacccaagggaggctggaccccagagaggagtccagatgctggcgaccaccagggactttccgggggagttgccatggggaagatgggttagagctcagttcacgtccaccaaacgcccccccacccccaccaccgcacacattgcacacacacatcagcttctcttaggatgtccagttaaagaacagttaccttggcttgaattccagctctgccacttacctcaagggacactcgaataagtcacatgagccttcgttttctcatgtgtaagatgggggtgataatatggccattctcatagggttgtggtggggatagcaggggattcatggtcttgaagtacttgccccgctcctcccagccccggggtaggtggccctgggggcagtcttccttatgaggggtggaggaacaggtgtgctgcctgcccctatcacagaagctcttgtttggaaaggcagtggctccttggctgaggtgtgcagcagcagtgactcccccttgactcacagggaggcttggccactgatggatgttctgggccccttcctcttccctccctcatcttccccactcccccagccagtcaggtttcctaagccagccctcacgggcatagtcttcatgctggggacagctcggcagtccatctgtttctatagaaaccaggcttcctgggaaagagacagggggttggggaagtcctccaggatctgcatgggaatgacgcctcagtcccatctgatctggccagggcagagcctgggcagccaccttattcatgttattaattgctgtcctttacagagtacacaccagaggccaggctcctcagctgcactttcttatcatcacacatcacaaacctgtgggctttgtacagaagtagtagtctggtttcacagatgaggacatagaggctcagagaggttaagtaactttcctgaggtcacagagcaataaagaggagcagggatttgagcccaagttttcccaatcgttacaaatatgcttaccacctccctgtctgtcatcctcttctgactcttgtatccccaaaaagcccctctcttcctggctggtttagtcttggggactttgcttgttcccgcctcgcccctgggaagcatgtggaggtgctcttccctggcctcagattccacagcagatggggaggtgggagggactgcagggagtcagatcttggctgaagagggcctcttagctcctcccgactcattcattcaatcacaaatgcctgttgaactcctcctgtgcccggagttgtcccaggctcagagaacaagacccaaagaaatccttgccctggggcactcccctgcgagtgatgccacagctttctgaggaggtggggcaatgtcagaggccagtgttctcatccagtcctctaaccttcacggctgtccagaccccccactgccaggtcctctgccaagagcatttgcaccccatctcctggagtcttcagcaccccatgagtaaggcaagtaaggcgctgtggtgtgatccccattgtattgagggctgagactgctcgcttaaggccacctgaccaacagagagtggccacttttgaacccagttctgcctaattggaaagccctttcctgccctatgccaccagcttccatgtggcctggggcacagcctcccctcagcccgccacgtctaacctgtgggcttctgagtgtgctggttgggcttagcctgacagctgctcattccacctgtgttgacaaagtgcctgctgtgcaccccagcctcacggggagatacacggaggagcacagtacaagccataccttcagactggttggtcttggggagtcaaactgccgtgaaatgaccaggagtagaggctataagtggccagtggctgcagacactgagacccgtgagagtccagaggaggatgaggacccagtgccctgggagggccctgggaagaggggctgtgtgcaagatagcctggaggaacaaggagcatggtggggggacagagtgtcccagggaccttctcacttgtgtaaagggtcagcaatgagaaccactgttgaaaggtttgctggctgatcgggaatgtgggcgagagcagctggcagggcagaagggaaaggttcaggatcccaggcctgggccctaggagccatgtcctcccttcttgccagacaggtgatgtgggtggaggagtggctgtccttgctgcccctgcccccagcctcctgcagcctggctcctgggggaaacccccgggggcccttcagaaggcagtggggcagagcaggaagcttcacagcactgatggcaggctttttccactgtgcacggctgagtggagaaagggaagtggaaggagggccagactcctccctgggcagggcactttccccatgggtgcccacgtgcactccttctttctctctccaccagcacgtctgcgaggtgagcgttctcactacccccatttcacaagaggggaaactgaggctaggagaggtgtagtgacttgcacaaagccatgcagctggcaagagggcagagccaagactcaaacccaggtcccctgcccccaaagccggggtttggccatagtgcacggtggagtcttctgtcctcacttaggcctgaaataaacacctggagtggccctgaaggggaggaaaggtcaaggggagacctcaggggtgtgtgcagcttgcctcgccagtggggcaggtgaggggctgctgggtggatctgatcattgcagggcccagtcctgggggtgaagtaggggtggagcgccgttctcagagcagttatctgtgctggaaggtgggtgtggggccctcctccctggaggtcaagattccattttctctgtggggccacatgggccctttgtgagtgatgccctccctgctagggtgggcttgggaggtgggcacagtggttcccaccagctcagatgtctgatggcagtgcccgtggatgaagattgtcccacccatgagtaattctgtccaggacactgtagtgcccactcttcccagccccagcaggtgggcactgacacgtcccacagccgttgatttgcagcagctgttgttgactccgtcctgggatgcagaggggaatgctctgtgtgtgtatgtgtgtgtgtgtgtgtgtgtgtgtgtatggtgtgtgtgtgtggtgtttgtgtggtgtttgtggtttgtgtggtgtgtgtgtatggttgtgtgtggtgtgttgtgggggtgtgtgtgtgtggtgtctatggtgtgtaatgtgtggtgtgggtgtggtgtgtggtatgtggtgtgtgtgatgtgtgtggtgggtgtgtgtagtgtgtgggtgtgtgtggtgtgtggtaggtgtgtggtgggtgtgtgtgcgtggtgggtatgtgtggtgtgtgtgtgttttgtgtgtgcattgtgtatggtgggtgtgtgtgatgtatgtgtggtgggtttgtgtggcgtgtgtgtgcacgtattgtgtggtgtgtgtagtttgtatggtgtgtgtgtggtatgtgtgtggtgtgtgtggtgtgtatgtgtgtggtgtgtggtggatgtgtgtgtggttgtgtggtgggtttgtgtggtgtgtgtgtgcatatgtgtgtggtgtgtgtggtggtttgtacggtgtgtgtgtgtggtgtgtgtgtggcgtgagtatggtgtgtatatgtggtgtgtgtgtgtgtgtactgtgtgtgcagtgtgcgtgtgtgtgcatgtgttggtggagaggggtcagcaggcagaggaaagcaatgcatccaatgcctggaagcttctgcccctcggaggtgggccgtggacacagcctgggcctggtgggcagtggctgagcgccagccttgtgcccggggactgagatctggggctttgcccagtggggcggagaagttaagaagtgttagttagatccatttcctactcctccatggcctccatcctggtgccactgccacatgggaggcctggggagggtggcagtgtctgtgtctgataattgcctgtcttcactggggacttgctgtgggccaggcacttccccatggcttcatggagattacagcttttattctcacagtatctctataagataggacaccttattttcccaactacacctgggaagactgaggcacgtagaggttaagtgactgacctgcccacgggcacacagccaggcagtgatggatctgggattcaaatccagggagcgtcctcagcagttaagcacttacccattaggccttctggcttgagcagtgagctggctctttctaaagcactgtctgtccattattttgtttctcctgagaccagctgtaggggaaaagtgaggttggctgttttcgtttcacagatgaggaccccggagctcagagaggaaaagtaacttgctctaatcagtggctagcagatcagcgccccctcccccggccaaggctgggagctctttcaggatagggggcctgtcccaccacccatgtaccttgctcacagtagacctcactaagtgcggattcctcaggcaaatgtgcaggtgttttgctgagtgctctgagcttttctttttgccccgggctccctaggaagtgggaatgatggctccatttcacagatgaggaaaccgagactcagagcacaaggccacacagcaggaagaggtaaggcaggactgagggaggcagcacgtctggcctgggagaggggttaaccagccaggaggagctcgtagaagggctgaaataaagaccgaccttaccgagtgttggtgaggatgtggaggaactggaacactactgcattgccagggacacgcagtggcatggctgctctgggaaacagtttgatgctttctctgaaagtccaacagggatgtaccacacagctcagcaattccacccctggcatttacatagagaaatgaaaacttacggtcccacagaaacgcgggtttgtagcagctctattcataatcatcaacaactggaaacaacccacatggccttcagtgaccgaatggataaacaagctgttacacgtaccccagggaatactgctctccaataaaaaggagcggactcttgatacacacagtgacttggaggaatctcaaaggcattctgctcaatgacaggagccagcctcaaaaggttctacgctttatcattccacttacatggcatatttgaaaacacaaaagccatagtgtcagagaatagatcagtggttgccagggtggaggagtgaggggagggtgtggccagcgccagggagtttttggggtgatggaactgctcgttgtcttgatctggagctggtggctacaaaaatctatacgtgtgctaacattcaaataactgcacaactgaagcccatcaattttgctgtatgtattaaaagataaaaggccatggggaggctggaagaggaagggcgtgggccaggcaacatccttggctgaggaacaggtgaaggacccggttctcaccagtggcttagtgactttcagggcagcctcgcctggccacgggagggacgtggctaattgtagcttctatctgggttcaccagaaggcagtggctagcagctgaggtgtcaggacggcgtcctgggccctccaggagccgggtgatgaaaggttaggccctggcttccctggcagggtagggttggcctcctgtcctgatggctggcacacaccgaagcattaaccgggagtctcttgtgtgccgggtgtgggactgccgtcacagttaccacccgccgctgtctcctttcaccatggggcctgtgtgtggggaggagaaaggcgtatccactcctttttgtggatgaggaactaaagccagggggcgtaggagggtagtttggcctggaaatgacatcacactcactaaagaccgccaatagcaacttttgcagtttttttcccaatgcgacatggtatactgcctccctagttgatccggtctacagccacattattcacagaccccacagtttgaaactgtgttctgatatttgttcgggtgctttattttaagacaccaggaggctcaaaaatgggaggtgacccggggacatccccgcactctgcctctggcagccctggctggggcaggagggtgagatttgcctggggccacagggcactgagacagcagggtcccctgctagagggcccagtggcttctgaccctgtctgtagatggggatggcttttctgccttgccagagggtgggtgcaagtgggaatgagattctggaagtggtccgaggtaggaagtggcacgaccgttattcaccttggttggcattgaaaccccgggagcttggtttcctcatttgcagcgtggccgtcaatagcgcccatcttgcagggcagctgtgattagagaagccagggccaccccggagccagcctctgaggcttcacctcaccccgtttacactgctgtctcctctgcatagatttggctgactgaggacgcgacaggtactcagcttctttctgcatctcagtcgcccagcacaggggctggcacgcagtaggtgctcccaacctggtccaagatgttgctggcggtgggggagtggggggctggggaggatcatgggcagacctggggtgccgggaggggctggtggggggctgatggccgggagggcaaggcctgagcagggaatctagaccaccttagtgtccccgtcaacacccctggcagccttctctggctctgctgggtatgagggcaccccctccccttctttggtcttggcaggtttgaaggggggtggcagggagacgggagaggggctcaccggcttgcaggattgggcagaagtttggtgggggcccaaaccccagaactcagaagcccctgccccaggcttggacagaccctccccttttctaaacctcatttgccccatgaatccaggctcctttcctccccatccccccaggaagcttggatgtggccgccatccagacccaaatgccctctcctgggccctgtgcctccagggctggctctaaggcaccatgcaacctgtcagatggggtgtgctgtgtccacctacagcagaccagctcccagagcctcaggggcctggagagcatttcctcaacccatttgacaaggaagccagctgtactccccctactgccctgggctcgtggggaggcctcagcaggcctggtgtggggtgtggccttccgctagtcaggccccttcccctagggtctggaagctgggtaggaactgtggcctgaggccggtgtctcccctcagcccttctgcagaggccgggctggaggagaagatggcggccaagcagcccccgcctctgatgaagaagcacagccagacggacctcgtgagccgcctgaagacccgcaagatcctcggcgtgggcggggaggatgacgacggggaggtgcatcgctccaaggtggggtgcagagcaggggcctccggcacccactggggaggccaggctgacccaccattaggggagaaggttagcccaggcccaggtagccgcaggagttctaggacttagctgattttcctagaaatgtaacagcaatgccaggggaataacgagatcattagaattaagtgcctattacgtgcccggttttccagcagttgctttttaaatcttcttgttggcactagaagatgcagatactgtaaaatcattcacccattttatagatgaggaaacaaaggctcagagaggttaggcaacttgcccaaggccacaccggtaagtggcaggaccaggcttcaagtctgcatttggcagagccctgagctttcatacgtcaccatcatattttcagcttcttttaaatcctagtgtcaaggggaagcaggagagggggtggcctcatgtgaccctccccacctgggggaacctttggccaagctgaggtgcccaggctggtccctgggtgtgcagggctctgggaggatgagcgagtgggggcgctgagagctgccctcaccctggttgcctctgaccccctctgtccacagatcagccaggtcttaggcaatgaaatcaagtttaccattcgggagcctttggggctcaggtgagcatttacctgactttttgggggaggggaaggcctgcggcggtggggcagaatgcataagacctcacctcatttggcctggtccctggattttattttgtctcattaccttccccaaagctgccatccctggggatctgggctggagaggggagggtcccctggggcagggctgtgatcttctttccacgcctcccagggtctggcagttcgtctctgctgtgctcttctccggcattgccatcatggtgagcccccacccccagcccctgagatctggccccgtgtggctccctcagcccttctctggctcaccagaggtgcctcctccatcctggcccctcgtgcaggggcccatctgtcaggctctggggctgcctccgagaacctgactcctacactgccacgcctgtgccttctccaggagcacactagatcccatggtttgtggcctgactccttctcccaggaaccctggagttttctgtcctggcatgggggcgggtggggacaattgggtccagaccctggactgcccccaaggatgctgatcctgctcctggcggggaaggaagacgtctgtgggaagcatcagctgtcaccccccaccctctcccaagcgggacctctgagcccctctcgctgcccgcaggcgcttgccttccctgaccagctctatgatgcggtctttgatggagcccaggtgaccagcaagacccccatccgcctctacggcggtgccctcctcagtgagtactgctggggcgggccctgggggaggcgacgggcagctgggagacccagcggggctgaggagagcacgggggtccgtgcccgggcaccccttcctttcttcggccagatgctgcgcccacaccccggcctctgatgaagctctctgctggggatgtgctgccatcttgtggccattggtggaatacacccagtgggttggagcttgcagtcgccaccatctgcaaggagcgctcataagtgtgtgcactgcctctgggcgttgtggtacagagatggaggaagcccaggcccagcctctaggaattcacagcctagaggagaggcagatcaattcagtgtctgcaaaacccctcgcaccccccctattttatccccagagccacttctgtttgaaccacttctgtttcctctctaacctgagatgcacacgttaggatttggaattacaatttttaaagctcagcataggtaatatgcctctatttctacgaaatattctatggctccctattgcctacagaataaaggctgagctcctctggagttagggttgctggaataaaataaatgcacacccagtggcatgtctggtaccagcagacactgggtgggcggggcctgctagaggccaagtcagtggtcttctgctaaaaagtatggttcatccccctcccccaggggacttccttaaagcgagtccttaccgggctcaggttttctgtctgggagtccgtgtaaaagaaaacccaatcataggaccaggtaacccattaactcatgaactccatcaacacagcatcctcctgacagaaccggacatgggcaggggccaggggctcagtcctccccctttataaagagatcgagtctcaatgcggggaagtgactcgcccagtgtcacatagggccttggaatgacaggagcaggctgaagcagcagcattgagtctggaggggacaggatcggggacagacagctttgatttgagaaatgtgaataggggcggaggcgtggagtccaggaccccagctgtcttgcagcagtggccagaggaagcaggagcagtcctcctgccctgctgggagggagtcagctgtcccacccccagcccccttttcatcccccgccccaggcatctccctgatcatgtggaacgctctctacacggctgagaaggtcatcattcgatggaccctgctcaccgaagcttgctatttcggggtccagttcttgggtgagtcctgaggtgggcagtgagggaggctgatgggccgcttcgcccctgacctgcctgctctagccacctgggtgtgtgggaagtgatgaaaacctgtctgtggggggctagggaggggatagagggataaggactcacctggctgtgtttacttgtgtgcctgcacacctgtgcacacatgcctaacacacgtgcctgtagcttcccaaatccacacacttgtatctatggccttgcacacacatgtacctgcggcccccccacacccactgcccactgtacccagcacgtgtgtaataacacgcattcaattttgcccacctgctgtgccccagttcctgccacatgggagacatcagagcagaaacatctgtggggttggcaggggcagggggcaggtcctgtgcttcccacctgggaggatcctgggctcagagcaaagtcagggagacggccacaccagcgctccgggctaggggggcagcgctgggacacatcccctcctctgaccctgtggccttgctggactctctcccacagtggtcactgccacgctagctgagacgggcctcatgtccctggggatcctgctgctcctggtcagccgcctcctttttgtcgtcatcagcatttactactattaccaagtcggccgaagacccaagaaggcctagttgcccgctgggcctggggccctgcccatgcctgggccagagtggcgctggggcctcggcttccctttggctcctggaaggcaggagggtcccctgccctgccccagtcctgccccagggaggcagggggtggggggccttcctttcctcctgggcaccccgtgtgctgtgatctcctgggctttcaggcttgacatgctggtctggggagagacagggcctctgctgccctgttcttcaccctcacagtgatacctcctttccttgggtctcttggcctccagaccccctcaatagacactgactaaagtcaagctggagtcatgagggtagtgggctaagtcgagggtccagcctcttctgccaggaagcccttcttgcttttgagagaggctgtgaccaccccccatccttctccctacactcccagccaacctagtgcccaagcagctaaacttggcttccttctaatcctggaaaaccctgtacccctcctcctcaatctggccctctccacatgcacaccctgaaaacacacacagacacacaacacacacacatacacacccctgaacacacacacagacacacatacacccatgatgtgagcaaacacacacacgtgcgccttcatagcccagccaagggcatgcaggcagggtgtgctgcctgagatggcacctccctttcagccattcttcaagaatgggccacacacagctagaagtcctctcccagctagaagtcctgtccccactctcctggcctgacaagatgagctctcctgggaccttgctctagggcactctgcctctaccctaggacactggaatgccctgggagccccctccctgcaaccagcctgagttcagccccacggacaaagggacacacagcccccaatggagaccattgtaagtggtggggctgggagaggaggaacagaaggaaagccatagcgctctcttgccccttggcatgtaccccaaggcctgatggccactgggctcagcctgtcccccactcctgcctgcttcccggtgagctgccccccacacgtgcagcccgggctgcctccagggtctggctgagtgggatcaggtggccctccaactcagcacaggaaataagtagaaacatttcagcaggccacctcccctcatcttccccgccctgtccagcgccctggcaaaggctgacaactggctgtcttggggccgaacagcccctgccctgcctctgagggcccaccagcctgtgctgcatacccaccgcccagcttctccctgagggcccaccagcctgtgctgcatacccaccacccagcttctccctgagggcccaccagcctgtgctgtacaccccgttagtccctgatcccaaccttctccctcctgccagcacaccgatgcacacaccggaagtggcgagcccaagccctggggacaggtgtagggagaaaagcagccccaggcctcagactcgcttcccatcctggcatagagtgggggatggctggagggtgtctataggtacagcccgctctggctgctgccaggtgggcccctgccaggggtcctcacccctgtccaccctgtgcctggctgtccctgcacccagatacagcaacatggcctgtacccagcagagtggtggcaccaccatggttacagcggatgccccgagactctgcttggtaaacgtggcagagcagaatgggaggctggaccctgaggaagggcccctctcctggcatctgtctcttgctacctaagcctgtgcctctccctaaagagctgcctccctgctgccgagccctggtctggccacgagccactactgcctcccacaggcaccactgcctcccgctgctgcccacaggtggtgccgccaatgggcagtgccctcaggccgaagcctcaatcccccatctgagccaggcctaatcctctaatagtgatggttggtttgtcctcccataactgcaggtggattccacctggggaatgaggctgcgtgtcgggcgtctgctggccctgagacatccagtcttccacactcaactgtgggatgggagggtggcgtggccttaccccatgaggctgtccaggctctggcacacagctgtgctcacaaaatactgggtggcttggttagagctaattgtagtggagcctgcaggtgagggtgagggagggggctgcaggtcaggtaagatctggaagacagacgtacagcttggagggcagggggactctaaggcaaggagatttacagttgggaaggaggcagtggcagaggggtgagggacaggggcccttaagtccagcgaggaaagctcggtgtgggcccgctctacgctccgtttggggtgacctggaacgcctcttctcccagctccctccagccatcagcagcctcttgtcaagcttctgcctcgccccagtctatccccaaccccaaatcaagaccacctttcttcacggtcactatttattctttgttcctttttctttttgtaagaaacattcacaaaaaccagtgcaaaaccatcagtgtgggcgtcctgttttatattacaaaacttcctctggatatatcatataaaaggggggtctcacaggagagaaacgtgataaattagctctgcaatctacggcaaggaacatagtttttaaaatagactttcaacatatgacccatgggggaaggaggagggggcttctggggagacggcgggtgctggggcctcggctggtttgggaaatcctgtccgggccccttaagcatggatagagacatagacaagggaggctgtggacaggcctgagcaccaaggccagaaattaacagggaccctggggaggggccctcacccccagcccataaagagctattccctttctctaagaggcagtagcttcagagcaggaaagtggctttcgatacaggcagggtttgtgatgagcggtgtagtcttcttgttccttgccctgttagtggggtccgaggaagtctctgttatgggctgttgtatttcggggtgaaaagaaacaaagaggtatccctgcccacccctcccccacaaccccagccaccaccagaacctgctgtgggttgtatctggaccaagccagctaaaccctgtttctccctgtgctctggagggaggctcaagcctgatttgggctgagctttctttgccttgcctccaaggaatggcctcaggcagtcttgcaaatagctaccagcctgagcgaatgccaacaggagcagaaactgcctgtcttccctttccagcctaagagggtggccagtggctggctggcgagctgaatcagggctgattgagggttccttggcacatttgtagaaagctgctgaggggcagtcttgtgtctgcccttgaacccaccttagccagatttcccttcatgaccagccctttctcttgggtcctccctctgacttctgtgggccccagaagcctgggatgcccctggattagagccataaagctgtgcaatttgcctcagtcctgcccagcatgggttttttgttttttgtttttgtttttgtgtgtcatcctcagaccagccatttgcctcttccaaaaagctggggctaagcatgtgggtggttcaagaggggcagcccccaggccccaggctgggccgcggtaccagtggcaggtccccctgggtctcaggagcttagcttctacggagctcaggtgtcatttatggggttgccagagcaagctgttaaagggcgaatttggtaagactgagctcagagacctggtgggagggcaaggactggcgggcacagcaggaggagattagaggagggtccacctgaatctttgcagcaggcacagagcttctggctgcatctcagaagggggcagacgcacaggccagggaacacggggctctaggctgtggctccgagtgtccctggtgactggaaagcctgaggggaggctggaagctgatacaggatgccggtggcttgtgagacagaatgagctctttcttcctgaagagggacagaggggagagaagagagcagacatcacactgctccttccatccctgcccgtggcagacatcactaatcaaacttacggtgcctggcagacatcactcatcaggattgcactgccgtctcccactgagcccagaccaaacctcagatccccagcacagcctccagcagccacccctgatctatcagggtaggagcatcttgcaatccagttgccaacactcgtctagagtttgagaactgaatacttgtgggtgtgcatctgcgagtctccctgcccaagcctggagggaatactaagaaatgtgcggacagtgaagagacaggaaaccttgttgcagcagaaatggcctcgatgccttcgggattctttagcctggagagaagagggctcaggggagtcaatgtgtgacctcaacactccaggaaggagagtgggcaagtgggatgccatggacagagccacagaaaaacagaaacctcttctgtgtattaagctgatgctaaagtcagagcagtccaaaggcaggaggctgccttgggaggtagtaagctctctgtccctggaggtatgcaagagggtggagaagtcttggcaaggatgttgaagaagatatccaagcctcagttctgggtgtggagagggagacccagatgatcttggggatttcttccactcttggagctggggagttggggaaggacagggaagggggtggcatgtgggagaggcgggcagtgtggacaagggaatgtgatgtgcacctctgtgtgttcctggggactgagagagaggtgtggggaggtaggagcgagggcgcggtgggaagtcatggaatggtgttttcttagctgtagagcagggaggaggcagttcctggctgacttgccctctcttgtctgggggaaccgggatgctgaggccaggggtgcatgtgggcagcagagctgacagagtcctggatgcagtgacagcagcctggagacaactcagcttcttttcagaactgtcacgcctgtgctgtgtgtctgtggatggtcactgtcctctctgggcctttgagattatttggtccaacagatggggaaagcaaggatcctaccagctgggccattcttggatgccgtgttagcagctcactcttggccccggcctgaaggggggaacagtccatcctccagtggaccagggattgcgctgtgggttccgagtcctcaaagacatggcagctgaatctccgtgcagcccctgggctttgatgacttctctgagatttgcttttgcctccttgttgcctaaatcctcactttcttggcatcaggtcctggtgcagtgaggagagagggcccagggtctggctggaccaaagagggcgctgggcctggtgttcctttggtctctagagcagcctgcatcctgggccaggtgctggggtctctggagaacccacggcacctgccctgagtccaggcgaggatacatcagtccatatttttgtcttcattttgttttgttaaaaaaatagctctattcccctggcccttctcctggccatctctgatggcctcatcttctcccctggggccaagaggacagcggggaggggcacgggaggacattgggtgctgggcagtggtgggtggggcgagtcttcaggcttcaggccataccctctactggatgccccggaagaggcacatggcaaagatcatggcgaaaagctgcaaaaaaagaaaaagagcaggaactggcttatcaggctgggccctttgtgggctgcctggcccactccaggggaaggggagtgaatgcctgtcactcttagcacactcctcccctaaggattcctgacattcccctggggccagcccttctcaccagcccctacctggcttcctttatgtggtggagtcatggaccaggaagactttagaaacgagtgttgggttcaaatccagctccctgacatagcagggttgtccttaggcaaagcacttccctacactgggcctgagtatgtatccagagcttgccatgtgccaggcacagttttttttttcttttttgagacagagtctcactctgttgcccaggctggagtgcagtggcacgatctcagctcactgcaacctctgcctcccaggttcaagcaattctcctgcctcagcctcctgagtagctgggactacaggcatgcgtcaccacgcccagctgatttttatatttttagtagagacagggtttcaccatgttggccaggatggtctccatctcttgacctcgtgatctgcctgcctcggcctcccaaagtgctaggatttacaggcgtgagccacagcgcccagccaaggaacagttttaagtgctttattgggaggtatgtaacctacctgaggtcacagagccaccagcaggggagcttgggtttcagtcccaggcattgtgaccccagagcccatgcttacaacccctgcaggctcgcctccagctcacaggaaggtggtgagatttaagtgtaatgcaattacctaatgatgtaatgtgcctcttatctagaagttgctcagtaaaaggttaccaggactgctatgaataggcaggcagctgcagcccttcccggagttatgagctccatccctgaacacctgtctgagggcctggggtggtggggcagggagaccctagctcagggactctgaccagatttgctgatgttctcacggccagagctcattgcaagtagctgagggaacagtccctagaccacaggtcatggccaaatcaccaggaggctcactggggtggggaggggctaccgggacggggccatgtaaaggtctccgtcttgagcaggattctgcctcccatggggctggccagccaggctcatgggctgggctgggagtgaggcagcagatcaagtatatgaatgctgcttcctgagccccagtagcatgctgtccccgtcatctgtaatccctctgtgccctgggagcagggtgatcagcccattttgcagatgaagaaactgtgacttagacatcctgcatttggagagaggcagagctgggagccggactctagggcccatgctattccttcatgggacacgtccctgagatttccctgggcttgctgcggatttatcttgttcattgttgcccgccatgaggggacttgttcaactataacagtgctggcgaagaatagggctcagtgtgtgcttgttgaatacatgaatgaataatcaatgacccctccctctccgccatctgcagtagcctccacgaaactgcactccgtggcgctgcaggcacagtgggaaaccaggcaaggcgaagttcatggtgccaggtgcccaggctgctggagggggaagctgaggattgggctgcctgacttccttcccccgcaggccgaggactgactgaggccccagagtgccccttcctgggtttggtcagatgtgggcaacgctctgtccagcccccaggagcagcaagtcggagatcccagatgatggagatcccagaggacagaaacgggaggcggccgctcctccctttggctgaggcgccacctagtggtgattgcaaacggtctgcaggagcttacctttcaaggggactctggggccctcagataaaggaggctaaggccaccgttgtggatgaataaggccctgtaggccctgaacaccccacagagaaaaggcctgatctcaaaccacgggctgcagcctgtccttcaaggcagccgtgctgatgcctctgcaagcgtgaaatctctctggaccatggagctggggcggaggtggggatgaggatggaagagtgagagggagtggggatgacactcagggcctgcccatccccatttctgggacactggctcccatgtttcatctccagagttcaagaatgactctcaggcagcacagacacagccgggcttaccaccccatagcacccacagtgggggccccttgggtcccaggtgaaggaaatgaagaggaaaggaggctggggggatctgcctaggctccacgtgaggcttcatcctggggagcggcagaagtgggggcctttacttacctcgatggccagtaccccgatggcaagggctccggccaagtagacgtaggtctcgaaggtgttgaggatcaccgtgtaacagccctgggagggagggatgagaggtcaagctatggccagggttgagagtcctggagtcagagtccagcatgtggactagggttcatggcaggtgtccccagagctctcaccctatcacacggctgctgagacaggacagtggggagggggtgcagggcaggagacccagaaacagcgacttggcagcattgcaccaaagaccctctttgccacccggcccctaaggtgggacagagaactgacagcgtgcaggccatgtctaatgttgcaactacagtgattggaatattgggaaatttcccataaatatttggacttcctgctgctctggagaaatcagaagaaccagcaaggggagctattccttttcacatcagcagctgctgccttcgggtgccaacaggtggtccctggggatccacagcactccacccctctcccccgcacaattccctattgtttcacacccactcgctctactgttcctcgtgacctgcctggctgcagaaggtgttttggttttcggccacttccccaaggaaacacagcccagccttcaaatccctgctcgcatgccacctccttcgggcagctttctgaaccagcccagtccacaggccctggacttaattcccatgatcttactgctttcttaagcaatcctagagatacataaactgagacagagacagagatcgagatcgagatcgagatagatagatagagataggaaaaagcaagctagtgccaagccaggagctgccagtccatggctgctgccccctctgaccccaagcacctcacacctctgtcattttcatgttcataactctcccctcccccatgctgaccacagagactgatgcatggtacttgctttgaatgacacgtattttcaaagtgggagaactttccttcctttataggagcctgcatattctttgggcccaggctgagaacctgcaagggaacaaatccccagatgggggtggagagatcatgcccagccctttttgggtgacggttgctatttctgggctctgttgagaccggggattcttgggtgctgacatgctcacttctcttgtccatcgtgcagaagcccagcccctttggccaaaagtaggactgaggctgcacccaggcaggtggacagcagggcctgatctgggactagtggccaggtggtgtcctagtacctgcctggaggctgaccaggagctgggcagggaagtcccccagaagccctccctggagccccatggagcaaacaggacatacccagatagaaacagaccccaccggcacgacgatctgggtccatgatactctcaggactgagtgtgcatgggaataatcggggaagtggttggcaatgcagatgccaagacctcgccccacaacactggatcagtgggtctggtgtggagcccaggtatcagcattataggacgatacccaaggtaatttctagtgatcaggctgtggccaggctttgaaagacctcaagcccagagatgacaaggagaaaaggtcttaattgaaccttcaggccttgtctctgctgtggcactgggagcccagttaagggctgtatgactgggatggagccctaagggcaacccaggggttcctaccccaggccaggccaggccaggacatcagtgtggctgggggtccgttcagggctggccctccattcagtgaggcccagggtccatcctggatctgccagcagacccatgttggagccccaaatcctttgttaagcgagttttttaaaaattatactttaagttctagggtacatgtgcacaacgtgcaggtttgttacatatgtatccatgtgccatgttggtgtgctgcacccattaactcgtcatttacattaggtatatctcctaatgctatccctcccccctcccatgtgaagcgattttgaagcattagaaccctaaaatgcagaactataacagcagaaaaactaacctgctctgcgagcaaggaaagagaggtgagttgtatagttttgggatcagccctggcaggggatgcctcggccctcccatcatcccctcagtgttccacgtgcctgccagccacagggacataatcccacctcctgcagccccaacacacacactgggtttgtgaactctttgaggggtttcccggacagggaacagcaatggcccaggagagtggtatctggcaatggtccttagggcctggttgcctagggtcccagccagcgctgccactggcttgctgtgcgaccttgggctatttacttcctctccctatgcctcagttgccccatctgtacaatggggccatgtagattacctcatgggattgctgtgaggataaaatgagatactgaaggtaaggcactaggaagagtgttggcaagtagcaagctctcaatctcaatgcctgttaggattaccaaggattaccgtccgtctctctgtgccgctctcttagcatatcctgagtggtggaaagtgtctgagcatagagttgggtgtcactgcaatataatcacacacacacacacacacacacacacacacaaccccacacaaccccagtaaggggacaggagaagcagcacatctcttccagagcatgaaattgactttgacatgcctcacccggggaaactggcaagaagccggggaccttgtccagcagagggaagctgagccctgctgtgtggcacctgggccttgacagctcatcttcccctatcaggctttggcaccaaagacccttcaggcccctggactcaaccaagcagcccaggttgcccaatggaagcttcccaggaacagagacacccctggggaggttggggcatggacaggatgccaccacccactctgaatgagtgtctgctctcttgataactttgctagggcctcgtgggctctttctcacttgatctcattacagccctcggggaggaggggtcttacctgcattttacccacaagaaaagggagggaggagcagtggctaacttgtttaagatcacacacgaggaagggaagccaggatttacactgaggattccaaattcccggtctttcctctgtgcttaagggaaagggggctggcatgagcggctgggttctccctcctatgggccaggccctggctgtagcccagagcttacatctacacacctggagattgcttcaccaccacccaccatctccaccccgtgacggtttcccctgtcaccacccggtgagacacatggcggggagcctctccccagcctgccaccacagactatgagtcttctaaccatgtgggctgttgccagtgccatcctccctctctgctgggtgggcacatcccccaccccctgctgccacccacagtcaccacccacctaatctgatgaggggcagccaggcctggttgccaccacaatgggtcacccacacgcaatgcttcccacacgtacatctccagcaccgacccctccagctccaccccatacacccagctgcccactggacacctctgctcagctgttccaaaggcttctttttttcttttttttgagatggagtctcactgtgctgcccaggctgaagcacagtggcatgacctcagctcaccgcaacctccgcctcccgggttcaagtgattctcctgcctcagcctcccaagtagctgggattataggcacatgccaccacgccaggctaatttttgtatttttagtagagacggggtttctccgtgttggctgggctggtctcgaactcctgacatcaggtgatccgcccgcctcggcctcccaaagtgttgggattacaggcgtgagccaacgtgcctggcctccaaaggtttcttagacgcaacatgccccagactgaatgcaagatcgtccccaaaccagaagccagtcactcagcacctcctcctgcccctcctccaatgaggacccatcacgaaggctggtagattttgcctcctgaacatttctcagatccacacacctctctgtctttaccgccatcaccctggtcttacctgctgtcctttctcactggcaccagtataaaagccccctgtctacccaggtccaccaccaatgtggaccagggggccacagagcaactaggatgtccctgtggccacgccatgcatccctgcacacctcacccccaccccaacccccacagtgaactcaactcttcccagatccttgccatgggcctgccagcaaagtcagaaatgtatcctagggccggacatggtggttcatgcctgtaatcccagcacttggggaggccaagagggtggatcatttgaggtcaggagtttgagaccagcctggacaacatggtgaaatgccggtctctaccaaaaaatacaaaaattagctgggtatggtggcatgtgcctgtagtcccagctacttgagaggttgaggtgggagaaacacttgaaccctggaggtggaggttgcagtgagccaggattgtgccattgcactccagcctgagcgacagagcgagactcagtctcaaaaaaaaaaaaaaaatgcatcctgggctttaagcaagagggctttggaggaaaagacaaatagagacagttccacagcagcagatttttaacgggacgaaatgcctaggagggacatgaatgtctcagcaaagaaaccccaggagccagtctcagaccctcaggaacaacagagtcactggaaagaatgaatgtggctgtgcagggacctctctgatgagctctgattttgaagacatgcccaggagaggaaaggagacatcctaacggaggatgagtccagaaatgggaagcacatctgatgcggggaatgcggcccatgggaagcctcctgaaaacttacaagtagcattaaaaggttctaagtttggctgttggcaacgggcatctcaaacaacagctccttcaccaagttacaaattcactggtctttcacataaaccccacgctatggtggccgctgtatgccatggaactgtacgtggcccaggctccttctctctggatgctctgccatcctaggggcca

SEQ ID NO: 1684 - DNA, 4099 bp, Homo sapiens
cccccagtctttgcccccgcagggccgcggacggaggtggtggcggagttcccgctgcccacaagtctggcccgaccttctggggtgggggcctgggggcaggggccctgggccggagaacccggggccgcctaacggctcggagctcaccgccgggggacaccggcgctgaggcctgggtctcagaaagtggcccttctgcagaggccgggctggaggagaagatggcggccaagcagcccccgcctctgatgaagaagcacagccagacggacctcgtgagccgcctgaagacccgcaagatcctcggcgtgggcggggaggatgacgacggggaggtgcatcgctccaagatcagccaggtcttaggcaatgaaatcaagtttaccattcgggagcctttggggctcagggtctggcagttcgtctctgctgtgctcttctccggcattgccatcatggcgcttgccttccctgaccagctctatgatgcggtctttgatggagcccaggtgaccagcaagacccccatccgcctctacggcggtgccctcctcagcatctccctgatcatgtggaacgctctctacacggctgagaaggtcatcattcgatggaccctgctcaccgaagcttgctatttcggggtccagttcttggtggtcactgccacgctagctgagacgggcctcatgtccctggggatcctgctgctcctggtcagccgcctcctttttgtcgtcatcagcatttactactattaccaagtcggccgaagacccaagaaggcctagttgcccgctgggcctggggccctgcccatgcctgggccagagtggcgctggggcctcggcttccctttggctcctggaaggcaggagggtcccctgccctgccccagtcctgccccagggaggcagggggtggggggccttcctttcctcctgggcaccccgtgtgctgtgatctcctgggctttcaggcttgacatgctggtctggggagagacagggcctctgctgccctgttcttcaccctcacagtgatacctcctttccttgggtctcttggcctccagaccccctcaatagacactgactaaagtcaagctggagtcatgagggtagtgggctaagtcgagggtccagcctcttctgccaggaagcccttcttgcttttgagagaggctgtgaccaccccccatccttctccctacactcccagccaacctagtgcccaagcagctaaacttggcttccttctaatcctggaaaaccctgtacccctcctcctcaatctggccctctccacatgcacaccctgaaaacacacacagacacacaacacacacacatacacacccctgaacacacacacagacacacatacacccatgatgtgagcaaacacacacacgtgcgccttcatagcccagccaagggcatgcaggcagggtgtgctgcctgagatggcacctccctttcagccattcttcaagaatgggccacacacagctagaagtcctctcccagctagaagtcctgtccccactctcctggcctgacaagatgagctctcctgggaccttgctctagggcactctgcctctaccctaggacactggaatgccctgggagccccctccctgcaaccagcctgagttcagccccacggacaaagggacacacagcccccaatggagaccattgtaagtggtggggctgggagaggaggaacagaaggaaagccatagcgctctcttgccccttggcatgtaccccaaggcctgatggccactgggctcagcctgtcccccactcctgcctgcttcccggtgagctgccccccacacgtgcagcccgggctgcctccagggtctggctgagtgggatcaggtggccctccaactcagcacaggaaataagtagaaacatttcagcaggccacctcccctcatcttccccgccctgtccagcgccctggcaaaggctgacaactggctgtcttggggccgaacagcccctgccctgcctctgagggcccaccagcctgtgctgcatacccaccgcccagcttctccctgagggcccaccagcctgtgctgcatacccaccacccagcttctccctgagggcccaccagcctgtgctgtacaccccgttagtccctgatcccaaccttctccctcctgccagcacaccgatgcacacaccggaagtggcgagcccaagccctggggacaggtgtagggagaaaagcagccccaggcctcagactcgcttcccatcctggcatagagtgggggatggctggagggtgtctataggtacagcccgctctggctgctgccaggtgggcccctgccaggggtcctcacccctgtccaccctgtgcctggctgtccctgcacccagatacagcaacatggcctgtacccagcagagtggtggcaccaccatggttacagcggatgccccgagactctgcttggtaaacgtggcagagcagaatgggaggctggaccctgaggaagggcccctctcctggcatctgtctcttgctacctaagcctgtgcctctccctaaagagctgcctccctgctgccgagccctggtctggccacgagccactactgcctcccacaggcaccactgcctcccgctgctgcccacaggtggtgccgccaatgggcagtgccctcaggccgaagcctcaatcccccatctgagccaggcctaatcctctaatagtgatggttggtttgtcctcccataactgcaggtggattccacctggggaatgaggctgcgtgtcgggcgtctgctggccctgagacatccagtcttccacactcaactgtgggatgggagggtggcgtggccttaccccatgaggctgtccaggctctggcacacagctgtgctcacaaaatactgggtggcttggttagagctaattgtagtggagcctgcaggtgagggtgagggagggggctgcaggtcaggtaagatctggaagacagacgtacagcttggagggcagggggactctaaggcaaggagatttacagttgggaaggaggcagtggcagaggggtgagggacaggggcccttaagtccagcgaggaaagctcggtgtgggcccgctctacgctccgtttggggtgacctggaacgcctcttctcccagctccctccagccatcagcagcctcttgtcaagcttctgcctcgccccagtctatccccaaccccaaatcaagaccacctttcttcacggtcactatttattctttgttcctttttctttttgtaagaaacattcacaaaaaccagtgcaaaaccatcagtgtgggcgtcctgttttatattacaaaacttcctctggatatatcatataaaaggggggtctcacaggagagaaacgtgataaattagctctgcaatctacggcaaggaacatagtttttaaaatagactttcaacatatgacccatgggggaaggaggagggggcttctggggagacggcgggtgctggggcctcggctggtttgggaaatcctgtccgggccccttaagcatggatagagacatagacaagggaggctgtggacaggcctgagcaccaaggccagaaattaacagggaccctggggaggggccctcacccccagcccataaagagctattccctttctctaagaggcagtagcttcagagcaggaaagtggctttcgatacaggcagggtttgtgatgagcggtgtagtcttcttgttccttgccctgttagtggggtccgaggaagtctctgttatgggctgttgtatttcggggtgaaaagaaacaaagaggtatccctgcccacccctcccccacaaccccagccaccaccagaacctgctgtgggttgtatctggaccaagccagctaaaccctgtttctccctgtgctctggagggaggctcaagcctgatttgggctgagctttctttgccttgcctccaaggaatggcctcaggcagtcttgcaaatagctaccagcctgagcgaatgccaacaggagcagaaactgcctgtcttccctttccagcctaa

SEQ ID NO: 1685 - protein, 187 aa, Homo sapiens
MAAKQPPPLMKKHSQTDLVSRLKTRKILGVGGEDDDGEVHRSKISQVLGNEIKFTIREPLGLRVWQFVSAVLFSGIAIMAFPDQLYDAVFDGAQVTSKTPIRLYGGALLSISLIMWNALYTAEKVIIRWTLLTEACYFGVQFLVVTATLAETGLMSLGILLLLVSRLLFVVISIYYYYQVGRRPKKA

SEQ ID NO: 1686 - DNA, 4079 bp, Homo sapiens
ccccgggagagcttcgcgggggagccgtgagcctggtttccccgccaacccccattcccgccgccccggcggccaccctgggggcgaggcagcccggcgcgtgggaggggacggcgcgccattggcttgtgcgcggaaccgagaggagggaccagcgcgggccgccagactcgcccttctgcagaggccgggctggaggagaagatggcggccaagcagcccccgcctctgatgaagaagcacagccagacggacctcgtgagccgcctgaagacccgcaagatcctcggcgtgggcggggaggatgacgacggggaggtgcatcgctccaagatcagccaggtcttaggcaatgaaatcaagtttaccattcgggagcctttggggctcagggtctggcagttcgtctctgctgtgctcttctccggcattgccatcatggcgcttgccttccctgaccagctctatgatgcggtctttgatggagcccaggtgaccagcaagacccccatccgcctctacggcggtgccctcctcagcatctccctgatcatgtggaacgctctctacacggctgagaaggtcatcattcgatggaccctgctcaccgaagcttgctatttcggggtccagttcttggtggtcactgccacgctagctgagacgggcctcatgtccctggggatcctgctgctcctggtcagccgcctcctttttgtcgtcatcagcatttactactattaccaagtcggccgaagacccaagaaggcctagttgcccgctgggcctggggccctgcccatgcctgggccagagtggcgctggggcctcggcttccctttggctcctggaaggcaggagggtcccctgccctgccccagtcctgccccagggaggcagggggtggggggccttcctttcctcctgggcaccccgtgtgctgtgatctcctgggctttcaggcttgacatgctggtctggggagagacagggcctctgctgccctgttcttcaccctcacagtgatacctcctttccttgggtctcttggcctccagaccccctcaatagacactgactaaagtcaagctggagtcatgagggtagtgggctaagtcgagggtccagcctcttctgccaggaagcccttcttgcttttgagagaggctgtgaccaccccccatccttctccctacactcccagccaacctagtgcccaagcagctaaacttggcttccttctaatcctggaaaaccctgtacccctcctcctcaatctggccctctccacatgcacaccctgaaaacacacacagacacacaacacacacacatacacacccctgaacacacacacagacacacatacacccatgatgtgagcaaacacacacacgtgcgccttcatagcccagccaagggcatgcaggcagggtgtgctgcctgagatggcacctccctttcagccattcttcaagaatgggccacacacagctagaagtcctctcccagctagaagtcctgtccccactctcctggcctgacaagatgagctctcctgggaccttgctctagggcactctgcctctaccctaggacactggaatgccctgggagccccctccctgcaaccagcctgagttcagccccacggacaaagggacacacagcccccaatggagaccattgtaagtggtggggctgggagaggaggaacagaaggaaagccatagcgctctcttgccccttggcatgtaccccaaggcctgatggccactgggctcagcctgtcccccactcctgcctgcttcccggtgagctgccccccacacgtgcagcccgggctgcctccagggtctggctgagtgggatcaggtggccctccaactcagcacaggaaataagtagaaacatttcagcaggccacctcccctcatcttccccgccctgtccagcgccctggcaaaggctgacaactggctgtcttggggccgaacagcccctgccctgcctctgagggcccaccagcctgtgctgcatacccaccgcccagcttctccctgagggcccaccagcctgtgctgcatacccaccacccagcttctccctgagggcccaccagcctgtgctgtacaccccgttagtccctgatcccaaccttctccctcctgccagcacaccgatgcacacaccggaagtggcgagcccaagccctggggacaggtgtagggagaaaagcagccccaggcctcagactcgcttcccatcctggcatagagtgggggatggctggagggtgtctataggtacagcccgctctggctgctgccaggtgggcccctgccaggggtcctcacccctgtccaccctgtgcctggctgtccctgcacccagatacagcaacatggcctgtacccagcagagtggtggcaccaccatggttacagcggatgccccgagactctgcttggtaaacgtggcagagcagaatgggaggctggaccctgaggaagggcccctctcctggcatctgtctcttgctacctaagcctgtgcctctccctaaagagctgcctccctgctgccgagccctggtctggccacgagccactactgcctcccacaggcaccactgcctcccgctgctgcccacaggtggtgccgccaatgggcagtgccctcaggccgaagcctcaatcccccatctgagccaggcctaatcctctaatagtgatggttggtttgtcctcccataactgcaggtggattccacctggggaatgaggctgcgtgtcgggcgtctgctggccctgagacatccagtcttccacactcaactgtgggatgggagggtggcgtggccttaccccatgaggctgtccaggctctggcacacagctgtgctcacaaaatactgggtggcttggttagagctaattgtagtggagcctgcaggtgagggtgagggagggggctgcaggtcaggtaagatctggaagacagacgtacagcttggagggcagggggactctaaggcaaggagatttacagttgggaaggaggcagtggcagaggggtgagggacaggggcccttaagtccagcgaggaaagctcggtgtgggcccgctctacgctccgtttggggtgacctggaacgcctcttctcccagctccctccagccatcagcagcctcttgtcaagcttctgcctcgccccagtctatccccaaccccaaatcaagaccacctttcttcacggtcactatttattctttgttcctttttctttttgtaagaaacattcacaaaaaccagtgcaaaaccatcagtgtgggcgtcctgttttatattacaaaacttcctctggatatatcatataaaaggggggtctcacaggagagaaacgtgataaattagctctgcaatctacggcaaggaacatagtttttaaaatagactttcaacatatgacccatgggggaaggaggagggggcttctggggagacggcgggtgctggggcctcggctggtttgggaaatcctgtccgggccccttaagcatggatagagacatagacaagggaggctgtggacaggcctgagcaccaaggccagaaattaacagggaccctggggaggggccctcacccccagcccataaagagctattccctttctctaagaggcagtagcttcagagcaggaaagtggctttcgatacaggcagggtttgtgatgagcggtgtagtcttcttgttccttgccctgttagtggggtccgaggaagtctctgttatgggctgttgtatttcggggtgaaaagaaacaaagaggtatccctgcccacccctcccccacaaccccagccaccaccagaacctgctgtgggttgtatctggaccaagccagctaaaccctgtttctccctgtgctctggagggaggctcaagcctgatttgggctgagctttctttgccttgcctccaaggaatggcctcaggcagtcttgcaaatagctaccagcctgagcgaatgccaacaggagcagaaactgcctgtcttccctttccagcctaa

SEQ ID NO: 1687 - protein, 187 aa, Homo sapiens; identical to SEQ ID NO: 1685

SEQ ID NO: 1688 - DNA, 4105 bp, Homo sapiens
gtaagccccggccgcgcaggcgccgcgcgcagtccagccggcccggccctgccctgccctgccctgtcctgccctgccctgccctgccctgccctgcactgcccggcccggcacgggcggcgcgatgtgaggcgtccgagcccggagcctccgcctggcatcagctccacgtagcccagcgccggcacgcgcgaggccccccttctgcagaggccgggctggaggagaagatggcggccaagcagcccccgcctctgatgaagaagcacagccagacggacctcgtgagccgcctgaagacccgcaagatcctcggcgtgggcggggaggatgacgacggggaggtgcatcgctccaagatcagccaggtcttaggcaatgaaatcaagtttaccattcgggagcctttggggctcagggtctggcagttcgtctctgctgtgctcttctccggcattgccatcatggcgcttgccttccctgaccagctctatgatgcggtctttgatggagcccaggtgaccagcaagacccccatccgcctctacggcggtgccctcctcagcatctccctgatcatgtggaacgctctctacacggctgagaaggtcatcattcgatggaccctgctcaccgaagcttgctatttcggggtccagttcttggtggtcactgccacgctagctgagacgggcctcatgtccctggggatcctgctgctcctggtcagccgcctcctttttgtcgtcatcagcatttactactattaccaagtcggccgaagacccaagaaggcctagttgcccgctgggcctggggccctgcccatgcctgggccagagtggcgctggggcctcggcttccctttggctcctggaaggcaggagggtcccctgccctgccccagtcctgccccagggaggcagggggtggggggccttcctttcctcctgggcaccccgtgtgctgtgatctcctgggctttcaggcttgacatgctggtctggggagagacagggcctctgctgccctgttcttcaccctcacagtgatacctcctttccttgggtctcttggcctccagaccccctcaatagacactgactaaagtcaagctggagtcatgagggtagtgggctaagtcgagggtccagcctcttctgccaggaagcccttcttgcttttgagagaggctgtgaccaccccccatccttctccctacactcccagccaacctagtgcccaagcagctaaacttggcttccttctaatcctggaaaaccctgtacccctcctcctcaatctggccctctccacatgcacaccctgaaaacacacacagacacacaacacacacacatacacacccctgaacacacacacagacacacatacacccatgatgtgagcaaacacacacacgtgcgccttcatagcccagccaagggcatgcaggcagggtgtgctgcctgagatggcacctccctttcagccattcttcaagaatgggccacacacagctagaagtcctctcccagctagaagtcctgtccccactctcctggcctgacaagatgagctctcctgggaccttgctctagggcactctgcctctaccctaggacactggaatgccctgggagccccctccctgcaaccagcctgagttcagccccacggacaaagggacacacagcccccaatggagaccattgtaagtggtggggctgggagaggaggaacagaaggaaagccatagcgctctcttgccccttggcatgtaccccaaggcctgatggccactgggctcagcctgtcccccactcctgcctgcttcccggtgagctgccccccacacgtgcagcccgggctgcctccagggtctggctgagtgggatcaggtggccctccaactcagcacaggaaataagtagaaacatttcagcaggccacctcccctcatcttccccgccctgtccagcgccctggcaaaggctgacaactggctgtcttggggccgaacagcccctgccctgcctctgagggcccaccagcctgtgctgcatacccaccgcccagcttctccctgagggcccaccagcctgtgctgcatacccaccacccagcttctccctgagggcccaccagcctgtgctgtacaccccgttagtccctgatcccaaccttctccctcctgccagcacaccgatgcacacaccggaagtggcgagcccaagccctggggacaggtgtagggagaaaagcagccccaggcctcagactcgcttcccatcctggcatagagtgggggatggctggagggtgtctataggtacagcccgctctggctgctgccaggtgggcccctgccaggggtcctcacccctgtccaccctgtgcctggctgtccctgcacccagatacagcaacatggcctgtacccagcagagtggtggcaccaccatggttacagcggatgccccgagactctgcttggtaaacgtggcagagcagaatgggaggctggaccctgaggaagggcccctctcctggcatctgtctcttgctacctaagcctgtgcctctccctaaagagctgcctccctgctgccgagccctggtctggccacgagccactactgcctcccacaggcaccactgcctcccgctgctgcccacaggtggtgccgccaatgggcagtgccctcaggccgaagcctcaatcccccatctgagccaggcctaatcctctaatagtgatggttggtttgtcctcccataactgcaggtggattccacctggggaatgaggctgcgtgtcgggcgtctgctggccctgagacatccagtcttccacactcaactgtgggatgggagggtggcgtggccttaccccatgaggctgtccaggctctggcacacagctgtgctcacaaaatactgggtggcttggttagagctaattgtagtggagcctgcaggtgagggtgagggagggggctgcaggtcaggtaagatctggaagacagacgtacagcttggagggcagggggactctaaggcaaggagatttacagttgggaaggaggcagtggcagaggggtgagggacaggggcccttaagtccagcgaggaaagctcggtgtgggcccgctctacgctccgtttggggtgacctggaacgcctcttctcccagctccctccagccatcagcagcctcttgtcaagcttctgcctcgccccagtctatccccaaccccaaatcaagaccacctttcttcacggtcactatttattctttgttcctttttctttttgtaagaaacattcacaaaaaccagtgcaaaaccatcagtgtgggcgtcctgttttatattacaaaacttcctctggatatatcatataaaaggggggtctcacaggagagaaacgtgataaattagctctgcaatctacggcaaggaacatagtttttaaaatagactttcaacatatgacccatgggggaaggaggagggggcttctggggagacggcgggtgctggggcctcggctggtttgggaaatcctgtccgggccccttaagcatggatagagacatagacaagggaggctgtggacaggcctgagcaccaaggccagaaattaacagggaccctggggaggggccctcacccccagcccataaagagctattccctttctctaagaggcagtagcttcagagcaggaaagtggctttcgatacaggcagggtttgtgatgagcggtgtagtcttcttgttccttgccctgttagtggggtccgaggaagtctctgttatgggctgttgtatttcggggtgaaaagaaacaaagaggtatccctgcccacccctcccccacaaccccagccaccaccagaacctgctgtgggttgtatctggaccaagccagctaaaccctgtttctccctgtgctctggagggaggctcaagcctgatttgggctgagctttctttgccttgcctccaaggaatggcctcaggcagtcttgcaaatagctaccagcctgagcgaatgccaacaggagcagaaactgcctgtcttccctttccagcctaa

SEQ ID NO: 1689 - protein, 187 aa, Homo sapiens; identical to SEQ ID NO: 1685

SEQ ID NO: 1690 - DNA, 56773 bp, Mus musculus
  misc_feature (1)...(56773): n = a, g ,c or t
cagatctcatgaaactggaggtatgcatggctgtgagccaccatgtgggtgctgagaattgatcccaggtcctctggagaagcagtcagtgcttataaccactgaaccatctctccagtgccaacattaagttacttttaattttttaattaaaaattattgtgtggccttgcagtggtggcacacgtctttaatcccagcattcgggaggcagaggcaggaggatttctgagttcgaggccagcctggtctacaaagtgagttccaggacagtcagggctacacagagaaaccctgtctcgaaaaaccaggaaaacaaaacaaaaaacaagcaaacaaaaaattattgtgtgatctggcagtggtggtgcaggtctttaatcccagcattcgggaggcagagacaggcagatctatgggtttgaaaccagcctggtctacaggtgggttctaggacagccagggctacacagagaaactgtctcaaaaaaaaaaaaaaaaaaaaagaaaaaaaaaaagaaaagaaaaagaaaagaaaagaaaagaaaaaaaagtgtgtgtccagaggcctacttgtctcctagtccatgtatgagacctgaggagagagcactagggagctggctttctccatccccttcacgtgggccctgggaattgaactcagttcttgggccatcaaatttgcaataagaggcttttatttcctcagccatctctttgacccttttaatcctaacaatttaaactgaaaacatgaattcacagataaggaactgactgtgtatatagatgcacagggctcctctgttgtcttgaaacagggtcatccccagttggccatctttctgcctcacttcccaaaggctgcgattactaatatgtgctaccatgtctggctcttttaaaaaaacatttcgatatgtgagccacgggaaataatgaaagtcttgtgaggtttaacgcatgaggagttgagggttctgtgggtgggatgtaggatcacgcgtgcatcttgaagagattactagcttctgcagagagcgggttaaaaggcctggcttagaagagaacattgtgatgtttccttgaaagtgtgcaagctaacgcaagcattcgcaagatgagtaaagctttcagggaggaagaggtctcgcagaagagagacactattgctctgtagttttgcctttttatgtgtccttgtaaaggggacagggtagagctggttcctaactactggagaaagggaagacacagtacctttcccctaaaaagtccttgggaaaattattgattactggggtaactgttaacctcctctcccaaagtgaacgcattcagctgtaacatagccccatggcagagcatttgtctggttcactctgttcaacctgtcccagcccaaagtatctatctctgtctatccatccttccatacactagactacagaaaactcaacttctaaattggcttatgcctggaatcccaccaccacttgggaagctgaggcaggtggactgctgagagttaaaaagtcaatcaaggttatagattaagactataaacaaaatgccgcatgaataaaaaaaaccaaatgaatatgaaagacaaaaccaaatctgatgttagtgtcatcgtcctggcacatggggacctaaggcaggaggataaatatctttgtttgtttgtgttttggtttttccagacagggtttctctgtgtagccttggccatcctagaactcactctgtaaaccaggctggcctcgaactcagaaattcacctgcctctgcctcccgtgtgctagggttaaaggcgtgcgccaccacacccggctgaggataaatatcttgaagcctgtctgagatatacagtaagatcctgactcttaaactcccttcatgcttggcttcataagtggatttgtgtccacgttcttcctaccaaggcagtttggtcacttcatattgctcaagaggcagaggctcctaactttgttttgttgtttttgttttttgagacagggcctcactctactgggactctctaggagaccaagctgtcctacaactgaaagaatcatctgcctgtggctcccaggtgcagggactgaagacccgactcaccacagctggcctaacttattttcttctaatactgcatgtcatcaggtggctctggcttcctggcattctctaggtagagcaggcttggattcacagagcgtctaatgcctctgcttctagggttccccgattaaagaagtgtactgaccacaccggctctatgctatttttatgagatggccatgaacttacagagatttgaggattaaaggtgtgggacgccactgcccagctctggtctcctctttgaggtttctttcctggagatttaatctcatcaaaaagacaccactattttttttttaaagatcttttgttaagatttattttaattttgtttatgtattaatgtgtctcacctgagtacaggcggcccattggctctcttggagctggaattgcaggcagctgtgaggcacccatgagggtactggggattgaagtcttgttttctggaagcgcagcaatacagagccaccactcctgcctcatgaagacttcttgatctcctgaccttggaatgtgctatattaattttggcacaaatgtccagaccatggtactcatttttctttttttgataactttccaatacaatcccttgcatgtttttattctattctgtttgtggttatttactgatgaattttgtgaacttcttcctacgtccagtttccaagtgctaggtttccatgcctgtgccaccactcctggcttaatagttgtggtttatttatctattttttgtttttttttttttgagacagggtttctctgtgtagcccaggctgtcctggaactcactctgtagaccaggctggcctcaaactcagaaatctgcctgcctctgcctcccaagtgctgggattaaaggcatgcgccaccactgcctggctaacaattgtgtttttaaaactgatttacaatgcttctttgtaaatcagtgaaccgacttttgtcatgtatatacaagatttctcttttcctgctgtttatgataaaaccacattttcctttagggggctgtgcagatagcttgttggtttttatggggcagagtgttttcctcttgtttggagacagccttggtaacctctactggccttgagagctttcagcaagtctcctgtctcagcctcccaggtgaggtggctcactggagctcacctggaaaaagtcaaatgtggtggtcagggtgtggtagggtatgttagggtgtgcttgcaattgctgagctgaggcaggcgaacccctggggcttactgctcagctagtttacccttctttgtgaattcctggccagtaaaacaaacaaaaacagctgggtgtggtggtgcctttaatcccagcacttcgggaggcagaggcaggtggatttctgagttcaaggccagcctggtctacagagtgagttccaggacagccagggctacacagagaaaccctgtcttgaaaaatccaaaaacaaacaaacaaacaaacacctcaaaacaaaaccagggccaccaagcccaagctcaatcatttgatgaaaagaacccactctcaacaggcccgacctccacacactccctgtggcacacacacacacacacacacacacacacacatattaaataaaaaataggatgtacatatgaacacacacacacactgtgagggtagaggtagagagagaacatgtttgtgcatgcatgtgtgtgtcaaaaataatatagtatctaatattatatgtatacacgtatattagatatatgtatataatgtatattcttgagtgacgtttttagataaaagggtaatatcaatacatatgtgtgtgtatgaatatatgtttatttttagcatttatcttaaggaagcagaacaggagcttggggatgcagctcttttggttggtagaatgggtgctattcccagcaccacaaaaataaatatgtaaataaaacattacacagtgttgttcttgcaagggtgtccattaaaaagctgtttaaatgatgactgggcctggtggaacaagtcttgggctagcacttggaaggtataggctggaggatcaggacttcatggtcttccatggctaacctgggctactcgaggccctacttcaaaaaaaataataataaaaataaaaagttgtttataatgggaaaattggcaaaagtaaacaataaaacaatgccctggttatgtcaaccatgcatatccacatatggtaagtgacaaatgccacaggatagctagtgatattaaaatgcatgaattgctaaaaatgagataggacctgactcacaaatatcaaaactagagtgctaagcacagatacactattttcatgatattgattaattccgggtactggaaatagtgggtaagacttttcttttttcctacaactatatttgaacaataaagtttaattttaatgtagcaattaaaaacaatgtaccttataattttagagatataacattgtttgtgtataaagtttagctttgacaggaaagaattaccctagctgaaaatatcctctagggtcaggcacacctttgaatgtttgatcctcctgcctctgcctcctaaggggtagggttatacaaatgagccaccttatttgactctaattcaatttttttgaaagaataacttctctttagataagaaagataaaagaatcaacagaaaagtttatcaaggaagattgtgaggaaagacatcataaactctttctgaaagtcttattctttgcttgagtttgcgagagtaaaatgagccccatctttctgggagatgacctgtaccatttctcagaagcagatcagacaaagggctgagcagcaaaggccctccaagacactacaggacagtgtagtctgaccaaggctcagctgagccaggtctaggtgtcacttcctatcagtcccccagggacagcatgaaccatcacctctagaagttttacaaaatttaagtgaaattagggggcagacagcttgggattgccccgttcttcaggggtcccctggtaagcattggggggttcccttaaatatggcagaaccctaacactaagtatgggggccacaggggaggacaggcccctgcttgttagttggagactggaaggggtgggggaattcctaaacactccatttacagagaaggagagccccttgttagtcacagttcccttagtacagggcatttggtggtagatatctgtttctgattccttcaaggtttctgatttcttgtaggttttagagacagacaactgaaataaacacacagagagacacacattctctctctttctctctctctctctctcacacacacacacacacatagacacacacacctactcctctcaccaatactatttggctattaattagttcaatggtcatagaatttaatttacataaatctagtattgctatttatttttttcttttcaggctggagctcctgaatgccaggctggcctcacacttaatatagctaaggatgaagtctggttctcttcctctcctttccaagtgatggagtcacaggtccatgctagcatgcctggtttctacagtcctggggatctaaccaaggcacgcttttatttttttatgctccagactttactctccctcccctctaagcccaccctgcatccaccctctgactgtttcacatcccacacctcctcttcacccctgactccacaaggatgtccccacctcccacccaaccagatctctaaactccctggagcctccagtttcttgagggttaagtgcatcttctctgactgaacccagacctggcagtcctctgctatatatgtgttggggcctcagatcagctggtgtatgctgccaggttggtggtccagcatttgagagatctcagggtccatgttaatgtatcattcactctttgagacagagtttctctgtatagccctggctgtcctgaaactcactctgtagaccaggttggcctcgaactcagaaatccgcctgcctctgcctcccaagtgctgggattaaagatgtgtgccaccacacggctccatcattcattctttaaaaattacttttatgtgtgtgttgggggcgggttgtctgtggagaacagaagaggcaactggatcccctggagatgggcttcctgggagtcctgagccgcacagtggctccccatcctgagtgtcactcaattagctcatgtttaaagataatttcagaaagaagccatgtggaaattatttaaatatttgtccattaattcattttttgagacaagatcttgtgtggcttaggctggtctaaagcctatagcagaggctagtttgaaatgatcctcctgcctcagcttcctcatttcagggattacagtaatgtgccaccatatctaacaacagtgtagacctataaaacataaggaaggatgtgcgtgtgaggaaaggcatttactcattgtgaatgccaagtagaacttgaactgttttggttgacttgattgctataaaaatacataggaagcagattctagcctaacttaatatagttcctattctacattaattagggattcaagcttgagatgaggtaagtttattagtttttgaataaagcagatgatatgaataaatacagatgacatttctcaatcttaatcttataattgattgatgtcagtaaccacttttttttttttaagggaaagaggctggggtggttaaaatataatgtatttatttgcaaaatgcttagagtcttaaaaaaaaaaacacattgaaaaccaagcatgtcattgtcacacttttccatactacagcagccacagcaggcaggttttccttcttcctccaaggtgtatggcacagaactgtctgaaaaatcaccaaccagaactcaccaactcagtctgagggcctttatccaagtacagggcctacggcacctgatggcaggtggcagtaagggtagatgataggaagacaccccaagtcaaagcttttggtggcatggcagtcccctcagtcagctcaccgaaattatgttgtcataggtgacaagtttacacaagtaaactcaaactcactttagaattcatcaattttatttcatatacaaaacttcattacaccaggtaccaaaattaaggcgaattaagtcaaagtggctttgaaaaatctaaatcgacacagctcaacacttgggcttagttcaatcagaagtgttaaggaaactgggcatggggctctcacctttaatcctagcctggactaaggcaggattgctgtgaattacaggtagcctcatctatacagtgctttctaggacaaccagggacatagagtgagacctgtataaacaaatcaaaagttccattgaggtaagctgggcatggtgacagacccaggctggagagttcaaggccagcaggctacataataatgctgtctcaaaaaaaagtgttagcaaatattaatttataacactgagaaaatgtgctttaaaaacttgtgtgcatgggcgttgttcctgcaggtatgtctgtctgtgcaccatgtgtgcctggtacctgagcaaatcccctgttgctgctattacaggctctgagcctccatacacttacacaggcagtcgcatacacaggctctgggaacttaactcttgagtcctcagacacaacagccatcaatctaaattttaaaacttgaaagatgagagaccaccatttatcaactgctctcttcactccactcccaccccaaaagggaaactccaggtgggtggatgtctgtgggttcaaagccactgttgcctagtgagttctaggacagctagggctacatagtctttaagaaagaaagaaagaaagaaagaaagaaagaaagaaagaaagaaagaaagaaagaaagaaagaaagaaagaaagaaagaaagaaaattagccgggtgtggtggcacacgcctttaatcccagcacttgggaggcagaggcaggtggatttctgagttcgaggccagcctggtctacagagtgagttccaagacagccagggctacacagagaaaccctgactcgaaaaacaaaaacaaaacaaaacaaaacaaaaaattaagaaaggcaggggggaaaaaaacaggaaagaaagcctgaaataggctcaaacatacgaatttttaaattaagcttgtgcaacatggtggttcacacctgtaataccagaactcgagatactgaggcaggatctttgtgtgtatccctggctgacctaaaatgtagactaggctggccttgaccctgtttcaaaaatcgctcccaataaataacagataaatcgacctcactttgtgaattaatgagtgtaaacgtgctaatgttttccaaatagagcatagttaatggggagggtgaatttaagggttcttaattggcaaggcctctttctgaaaaacaaaaacaaaaaagtaaactaatataacttagggaggttcatttccagcttagaccgatgtaatcactctaaattccatacgcgatgccaagagcttttctcaaaatcctaaaaattaattctcatctacacaccctgtcttcggagctgcactcccttcgcggccgcacgcggcgcccgcagcagctgactcctccccgttcatggggaaaaccctgcctaatatttataacgctatgacatactgtaatactcacaaggtggttgtagaagtataaacacgactggagatatctgattggctgctggtgatgtaacacccatgtcaatacttcccactgaacgcacgtgttcgaccttttatttaaatttccatttcatcacagcaataagacactcggggcggtgcattttctgcgaaacgatcgtcgcccggggccagaggtgctgcccggcgtacacaaggagcccaaggaggtgtcctcgcgagggaggcaccgcctggtccagtcttttgtgcaggaacaaaataagttcacttcctcgggcacggccacccacccctcccccggcagatgacagggccgggcgcgctcccaccgcacttactcctggagtcccaggtgaagtcgtggcgagagccggggaccgtgcgcacgggcgcgccgcggcgagccggcccctgacacccgccagctgtttgtcctggccgagccggccccgnnnnnnnnnnnnnnnnnnnnnnnnnnnnnnnnnnnnnnnnnnnnnnnnnnnnnnnnnnnnnnnnnnnnnnnnnnnnnnnnnnnnnnnnnnnnnnnnnnnnnnnnnnnnnnnnnnnnnnnnnnnnnnnnnnnnnnnnnnnnnnnnnnnnnnnnnnnnnnnnnnnnnnnnnnnnnnnnnnnnnnnnnnnnnnnnnnnnnnnnnnnnnnnnnnnnnnnnnnnnnnnnnnnnnnnnnnnnnnnnnnnnnnnnnnnnnnnnnnnnnnnnnnnnnnnnnnnnnnnnnnnnnnnnnnnnnnnnnnnnnnnnnnnnnnnnnnnnnnnnnnnnnnnnnnnnnnnnnnnnnnnnnnnnnnnnnnnnnnnnnnnnnnnnnnnnnnnnnnnnnnnnnnnnnnnnnnnnnnnnnnnnnnnnnnnnnnnnnnnnnnnnnnnnnnnnnnnnnnnnnnnnnnnnnnnnnnnnnnnnnnnnnnnnnnnnnnnnnnnnnnnnnnnnnnnnnnnnnnnnnnnnnnnnnnnnnnnnnnnnnnnnnnnnnnnnnnnnnnnnnnnnnnnnnnnnnnnnnnnnnnnnnnnnnnnnnnnnnnnnnnnnnnnnnnnnnnnnnnnnnnnnnnnnnnnnnnnnnnnnnnnnnnnnnnnnnnnnnnnnnnnnnnnnnnnnnnnnnnnnnnnnnnnnnnnnnnnnnncgccggcgcggccgccgccgaggacgtcaaggagttgctgctgctccctcaggacacgggcggcccctccttgctgggcggcggcgcggggggccccctgctagcggaaaggaaccgtcggactctggccttccgcgggggaggcggcgggggtctcggcaacaatggcagcagccgcggccgcccggagacctcggcgtggcccctcaggcatttcaatgggcgagggccggcggccgtggatccggagctggacgcgctggaggggaaggagtggatgcaggacggggcgtccctgagctacagcaccgaggaggagggggcgagcccgggcgatggcagtggggcggaaggcggcagctgcagcagcagcaggcggtcgggcggcgatggtggggacgaagcggagggcagcggtgtgggagctggcgaaggagagactgtccagcacttcccgctcgcgaggcccaagtccctcttgcagaagctccagtgctccttccagacctcttggctcaaggacttcccttggctgcggtactccaaggataccggccttatgttctgcggatggtgccaaaagatccccgaggatgggggcggcgtggaccttacccaggtggggcatgatgagctttcgcgagggacccgcaactacaagaaaaccctgctcctgaggcaccacgtctccaccgaacacaaactccacgaagccaacgcccaggtaccgtagatcctgcccttgcttttcgaccacatcttttgggaaaggtttatcagtggggaagactaaaactaaagtaaagaaggggggaaattaagatcctccgggggaagactcacttcgttccgatcgagagaggttctcgagagcttatgcgtaggggtttagaaagcctggaaacaaagttttccaaagttgtggatctattgggggaggaggggtagaaggacagttttctaatgatatcgctgggtttatcttctttttcgagttagggtttgcctgtgagattgaatccgagagagaggctgggagaggttggagattttaacctttgattgactttcggtcaaaaaggatttttttttttaagtcagaggagattttagaactgtcccttcttgtgttcgtagacactaaagtactagaagtagcctgaagaatggattaaacagtttccttaagcttcggtgctacaggctgtccactcttaaactcgtgtcaggtcgagataatgtgaaatatgagaggcttatgcaaatgtacaggaagttagttcagtagggtaaataattttacgatgtccgtctctgttaaacttgtttggtataatcattgtacactttagctagttacttactgatatttctcttctgagtgtattatccttttcaaaaacatggtcgtgaatagcttatatgaagggtgttaatcttagctctggaaatgtttaatgtgaagtgatttgggcttcatttgctcactggaaacctagttacagagcaagcctacctatgagctttagtccccctcccccctttttacaggagcctgaccgttttgatagcccttttcaagtcaaatagctgttggtcagtcttcctttttatgactcagacaacctgtggtggtgggtggaattgattcttttgtgttgctgaccgacactcaggtattagtacctcaccatggtgtttatgggagccatcctgctgctcagcacacttacactatagtttattagtcacacaagtaacccagcttagagaggctttagttttaaaagcatgggttattttgtttggttgggttttttttttttcccccagaaggcagggaaatggagcttgtttgggttgagtttttatttgcacaaaatttcctaaatcttagaaaggtctctcccctatccgccccccccttctttctctcctctctagggtctctggctaccttggagctcttaagtatatagaccaggctggtttcaaactcaccgatctgcctgcctctggagtgctgggattaaaggtgtgtgctaccacaccttctgaaggtcacttacttttaagatgtaaagcccatttagtaaattgccttaaaccctggatgacagcctgaggctagtgcttataaagacttttgtaatgggggaaaaagtgagctttgagcaaatgcaggttctgatctcagttttctttatcactacctttggagtttgtcctggaagtttgataggcctgacacttttgttttagctgtatcagactcatttacattatccaggaaagtaaatttgtttccttttatagaagaagcatttcagtcattaaagggttaaggcttttcagtctttaagagttaagtaataaatacctggaagtatttagtaagatgatagaagctgtggcttgtgaaaaatggaaggctgaattttccaagtattggtatgtaagtattttagatttttttaattggaatgagtttttaaatctagtatttagaatattctgttctgtaggcaaacatgagtgggactaaaaattagctgctcagtgatccataactcagaggggattaggtggataatcttatggtccaccctagtaaatgggtgtatcctgcaggcgtgtacctaggtctccagagctcagttctagggaaaaaccttttgtcaacttgactctgaactaccctttccatttcccgacgacatggtggttttgtgtgaggtaggagccatcccactttttaagacttgggttaacgccttaaacttgaggagttatgtattggtttccttggttgaattttaggtgttaccacttcatcatttatcttcacttgtgactaacctttgtttgaggaatagcttattcttccaagaaacacctgtaaagtctctttcccttgttaacagtgaccggttcctagcaggatttgatggggtgggggttgtgtggttgttgttgccctgtagcctttggttacctttaggaggcagtgtaacattctgtaagaacattcttgggtcctggtcctctaaccgttattttgtatcatgcttattttattatagcttactcttagacaagcgtgaagacagtgtcttgtcccctggttggcctcatgcctgctttgaccctcttacctatttctcaatgtttggactcctggcccaccaggccccagtgagggtttaactagtgttgggtagctgatctggtaccttaccctgggtagacccaagctctcactgctgagcagcactccccacgcccaagattggtttatttcctggtccctcgttcataagtgccagcgtttacatttttatcttactacaacagaatcttgggtagcatggtttgacctcagaatgtctttgtgtcatccattttgaagccactttgtaatggtattactcttgaatggagagcagattatttccccattcatactttccaagactgaggcccataagcctgggcattttgagtttttctcactataaatgtaattcagtttcatagtgtcctgtattattagcttcctcattttaaaaatgagatggaagctgctgaagagatggctcggtggttaagagtgcttgttgctcttcacaaggtgaggtctggttgtcatcacatggtagctcatagccatccataattccagttgccagggcatccagcaggcgcaaatgtgatgcatgtgtgtgtggtcatacatataaagctcatgggaagtgaaaatatgaaggtcatcttcaggtatatacctgagagacagtgtaaaaataaaatactgtatgtgagttctgaaactcaggaagggctgagtttgacctgggcatgctgtcaacattctcttaaacccagtgctgtctaaaactcaaggcaccaggagctcagctctagagcagccaatagggctctgtaatgtaatgagaccctgtaggccggaagggtttactccctcctttcctcacacttctctttcctttgagacacagcctcactttggggcagactgagtttgaattcatgatcaccttgcctctacctccagttcatatggatagttctaagacttcctttcccctagcccctaggatttctctatgtagccctggctgtcctggaattgtgtatcctagcctgacctccctgcatgctgggattaaaggtgtgtgtcaacacatccagccctcattcatttcagtttttctagaggtaaggatcaaatttaaggtctcatttatgctaggaaatcactctgccgctgatctgctccttttttttttttttaattaaaagaccttttgtgatgtcataaatgtttaatttccctttttattatgtgtgtgttgtgtatatagtgggtgtgcacacttgggttgcaggtgcctgaggaagtcagaggcatgggatctgctggggaacttagtttctgggcttgtgaatcagtcacctgatgtgagtggtcagaatgagatgccagcccttggaagagcagcaagcgctgcacggtcatcgcttcagtctctgattgcttcagtctctgctgcgctgcttttattattattattattattattattattattattattttgctattggtttttcgagacagggtttctctgtatagccctggctgtcttggaactcactctgtagaccaggctggtctctcgaactcagaaatccacctgcctctgcctcccaagtgctgggattaaaggcgtgcgccaccaggcccggctgcggtgctgcttttaaagacagtattttactttgcttcatagcctggctcagtatccaacagaagaccccagtaccctggtcttgtaagtgatgggacttcaagcttgtacaatgctgggtgttcttgctcattagtgttttgagacaggatctcttcatataggcctggctagtctgaaactcactttgtagatgagcctggccttgaactccagagattactgacctatctctgcctcaggagttcctggggctaaaagcatgtgttggatttttgagttaatatgttgttattagtacattattaaagtttacttttatttctcattttcttgggaggtcaggtacgggaattgaaaagctaaggcctcttgcacactggtccaagctttactgttgaactgtgtctttagtgccccttttacacagaggcatggcttctttgtgtagccctgactggtcctcctctgcctcactgtgctggaattaaaggttgtgtgccgcctccaccaccaggccccccctccccccatttaagacaggatcttgtcaggcattgcctaggctggtctgggactcctacctgcaagccctggtaggccttgacacttgtgagtgtcctggttcaggctcctgagttgctggacctacagacatgttctttgcccaggacttgtttcttattctttatataaaagtcctttcttttccttctcttcttcctccctctcctcctcctcttcttactttgttttggtggtgaccaaaaacaaacaacaaaactttttggagctaggtttttgcaaggttccacaggctcgttggagcctaaccctctggtcatgtcctgcctgctccctggtaattggaagtccgagtctgtccgtgcacttgggttcagggcctgtctttttacttagaccttagttgttagggaccgaccccaaggagaagtggggctttggctttggtggtggggtttggggttttgtttttgaagcacagtttctcatgacctcaaactcttacgattattttaagacgtgtgtggtgtgtgtgtgtgtgtggtgtgtgtgtgtgtgtgtgtgtgtaggctggagggcagcttggtggatgttactctgtaagttgtgggctgccaagcaccattagctgtcaggtttatgtgatgagcactcttaaccagcttggggatctctgggacttttacttcaaattgtgcctctattgctgggtctacagatacatatctgtaggcttggggaagaactgtgttgtttgggggaggcgttttgatcctagggttctgtgcatgctcgctagtcaagtgccactgactacatcctccctgggaggaatcgaagattcttgtaagagaggaccctccattggaaagtaagacacttgtttggtgctggagatctctatagtttttttaagtatcctcagagtcaatttcaagaattatctcattcagaatttggccatttggcccagaaagatttttaaattgctttaattatagtgattaccactgtagcttggttcagaccactttctacccaattgtgaaattctcagagcccagatcactcattctgtcaactctatgcagtctgctaggcctacagcgtacacccaaattattattattgtaagcttagttaacctttccagaaattaaacatgaattcaacccagtgatgtgattgaaattactagttggaatacgttgatgtcaggtggaaaagagaaaggtgaggcaggtctgccagcccttgctttggaaacaggaagtcccaaaggttagttgtatactcttgcttttttggctagtttttaacaacttagaaagaaagtgtttttttgttgtgatctatgtatacatacttggcatgaatacaggagcatgtgtgctatacagcatgtgtgtgtgtatggacacaaatggctaacaacatgatttttagtaagagaatcaaatgtctatgtgctcctatttagaagtaccagcatactgcatatgtgggtttacaatttgaggagaaagcttataataaagatctatactagccgggcaggggtggcacatgcctttaatcccagcacgtgggagacagaggcaggtggatttctgagttccaggacagccagggctacacagagaaaccctgtctcagaaaaacaacaacaacaaaaaagatctatactagaggccaggtggtgatggcaggacaggtttttaattcctgtacttgggaggcagaggcaggggaatctctgagtttgaggccagcatagtctacaaagtgagttccagaacagctagggctctacatacatacatacatacatacatacatacatacatacatacatacacacacacacacacacacacacactcattcatattcattctctctctctctctctctctctctctctctcacacacacacacacacacacacacacacacacacacacacatgtatgcaaaaccaaggattagaatcacttgaaactcagctcctcattcccaaaaagaattagaatttatggtggatgtggtattgtattgtattgcctaccacataggcagacagaggtaggctgatcttcgtgttggtctgcatagtggattccaggccagctagggctatgtagtcagaccctgccttaaaggaaatgaaacaacagaagtagaatttctagggatagtgtttgagccataaaagagaataacatcaacacacaaggcactgtaatagagatgatagactgcagaggagaactgatctacttttttttttaaatcggcagttaaatgcgttagcaccagtagaagattgtgattatatttgctatgaccttgtttgtcttcacattctagaaattgaattttatttttaaatttggaagtagaaattattttctctcaatatactgttcctagtgagttattgaaacaaagcaatactgatttttatgtactttaggttcatatactgatacttgtgaaaatgtcttttctgctgattatcgtagacaaaattctgagcaagaaaggaaaacagccttttacactaagtgtttttctattgttgttaatgggctgataagctgtggtcaagtctgtatcagttagctttgctccttcacctcaaagggggacttgcctagtggtttacaggttgcagtgaagttctccaaggtagaatggggaaagagtaactgccatctctcccaggtctcatcgccccttaacatcgccttccctagtttcaaggtctttgcctcctctaatacattacatcacactctccccctttgtaaataagccaagaggaaacagtaaagcctggctggccttaaattcgctcttttcagttttgtgtgtatttgtctgcatgtatttatgtgtataccacatgcatatctcatattagctgagtccaagagagtctcctgtgagacatgacatggataccaggaactcagcccaattctctgcaagagcaccaaataatgttctgagctctctccagccccggaactcaaccttcttcactgaatgattttgaactaatggtctttgtctccataaccccagtgattgggctacagctgcatatatcactgtacctggtcttaggcagtgctgtggatcaagcacaggacacaggactttgtgcatgccagacaagcactctaccaattaagctactatgctagaactattaacagtaggttcccagctggtcatagcatttgtcttcattctctggtattgattcctcttcacatttctttcttcagtctgtcagccaatccaatgtatcttttgttaagcctggacctacacccacacccacacacacacacacacactcacacactcacacacactctgtctctctacttgtctctttctctcacacttacaattaaaagttccataaggcatacataacagcagttcttgccctttttgaaagataagcttttatttatttgtatggcactgggatttgagcctagggttatcataggcagccatcccagctcattacgttttcatttaaagtcaggcatagtggcacatgcctttagtcccagcacttaggcagaggcaggcttatctttgtgagttccaggacagccagagctgcacagagaaaccaaaaccgacaaagcttgaacttgagaccctcctgctttagcttcccagtcactgccaccgttatcagcctttgtcttcaggctcagctctatcagtttattgtggtccttctgtatatagctcagaatggcctggaccttgttattgtcctgttcatatcccaggtgttgggattacaggcatgtgtcactaggaatggaagtgctgcttgtttataaatctgatggacgtggggggtgtttacatgtgggaactgtgttgtttatttgtgctttatggacactgggttacaccttgcatctcttatgaatctagacttttaaggatgctacagagcatcttggttatctttttaaaatggtatctcatttgtttaaaatgtgcagcctcctgccatattaatttcttatcttcaaagcacctctgtccccacagggaaattggaatggacaccagctcttagatagcatagacctgaatcctttaacattttttactctaatacaaagatttgattaaaggaatttcttaatttactggattcagcaaataatgtctttatttgctgtgtctacttagttgttttgcaaaaaaaaaaaaatcttctaatctcttgggagagaagataaattcatgactttttttttttaaagatttatttcattttatgtatctgggtacaccataggtgtcttcagacacaccagaagagggcatcagatcccattacagatggttgtgagccaccatgtggttgctgggatttgaactcaggacctctggaagagcagtcagtgctcttaactgctgagccatctctccagcctctcatgacattattttgaagaattttttttctttaaaaaatatttatcttatgtgtatacttgttttgcctgcatgtagtatatgaagaacatgtatacctggtacccaaggcggccaggaagagggtgttgaataccctgggactataggaatacatagtgagacttcccatccagaaagggaaggtaaaacccacattaggagggggttatatctaattattgcaaccatcttaaagctacgtcattagatcctacattttctgaagtggtcccaccaaattatgtaattatgttacatttgtcacacaaaatgtccttatttttaaaaattacttgaaattgctttaaaaattacagaagcctagccacaacatacccatattatacaaatgaaatactatgtaaccaccattgttttattgccactgtagaccaccacccaccgtttgctttcacagagtgactcctttcccacaactcacggaaggataagctgtgtacaacagctactaagacagccctttaccaagctggcagagctcagggtgcttagggacatttgttgctattagaggaggagggggacccaggttcaccttccccacacttagagattggctcaattgtatattccagacaggcnnnnnnnnnnnnnnnnnnnncacacacacacacactcattcatattcattctctctctctctctctctctctctctctctcacacacacacacacacacacacacacacacacacacacacatgtatgcaaaaccaaggattagaatcacttgaaactcagctcctcattcccaaaaagaattagaatttatggtggatgtggtattgtattgtattgcctaccacataggcagacagaggtaggctgatcttcgtgttggtctgcatagtggattccaggccagctagggctatgtagtcagaccctgccttaaaggaaatgaaacaacagaagtagaatttctagggatagtgtttgagccataaaagagaataacatcaacacacaaggcactgtaatagagatgatagactgcagaggagaactgatctacttttttttttaaatcggcagttaaatgcgttagcaccagtagaagattgtgattatatttgctatgaccttgtttgtcttcacattctagaaattgaattttatttttaaatttggaagtagaaattattttctctcaatatactgttcctagtgagttattgaaacaaagcaatactgatttttatgtactttaggttcatatactgatacttgtgaaaatgtcttttctgctgattatcgtagacaaaattctgagcaagaaaggaaaacagccttttacactaagtgtttttctattgttgttaatgggctgataagctgtggtcaagtctgtatcagttagctttgctccttcacctcaaagggggacttgcctagtggtttacaggttgcagtgaagttctccaaggtagaatggggaaagagtaactgccatctctcccaggtctcatcgccccttaacatcgccttccctagtttcaaggtctttgcctcctctaatacattacatcacactctccccctttgtaaataagccaagaggaaacagtaaagcctggctggccttaaattcgctcttttcagttttgtgtgtatttgtctgcatgtatttatgtgtataccacatgcatatctcatattagctgagtccaagagagtctcctgtgagacatgacatggataccaggaactcagcccaattctctgcaagagcaccaaataatgttctgagctctctccagccccggaactcaaccttcttcactgaatgattttgaactaatggtctttgtctccataaccccagtgattgggctacagctgcatatatcactgtacctggtcttaggcagtgctgtggatcaagcacaggacacaggactttgtgcatgccagacaagcactctaccaattaagctactatgctagaactattaacagtaggttcccagctggtcatagcatttgtcttcattctctggtattgattcctcttcacatttctttcttcagtctgtcagccaatccaatgtatcttttgttaagcctggacctacacccacacacacacacacacacacacacacacactcacacactcacacacactctgtctctctacttgtctctttctctcacacttacaattaaaagttccataaggcatacataacagcagttcttgccctttttgaaagataagcttttatttatttgtatggcactgggatttgagcctagggttatcataggcatccatcccagctcattacgttttcatttaaagtcaggcatagtggcacatgcctttagtcccagcacttaggcagaggcaggcttatctttgtgagttccaggacagccagagctgcacagagaaaccaagaccgacaaggcttgaacttgagaccctcctgctttagcttcccagtcactgccaccgttatcagcctttgtcttcaggctcagcatgtgacacatgcctgtaatcccaacacctgggatatgaacagggacaataacaaggtccaggccattctgagctatatacagaaggaccacaataaactgatagagctgagcctgaagacaaagggctgaaaagggaaggtaaaacccacattaggagggggttatatctaattattgcaaccatcttaaagctacgtcattagatcctacattttctgaagtggtcccaccaaattatgtaattatgttacatttgtcacacaaaatgtccttatttttaaaaattacttgaaattgctttaaaaattacagaagcctagccacaacatacccatattatacaatgaaatactatgtaaccaccattgttttattgccactgtagaccaccacccaccgtttgctttcacagagtgactcctttcccacaactcacggaaggataagctgtgtacaacagctactaagacagccctttaccaagctggcagagctcagggtgcttagggacatttgttgctattagaggaggagggggacccaggttcaccttccccacacttagagattggctcaattgtatattccagacaggcctacaaaatgaacttcctgccttggctttccaaagtctgattatagggctcctgatcatactgcttgttatttaaactttaggtggttgtttactttgaaatgctaattcactgccccccacagacttcatagaaatgctgccatagtttgtcagattccttcttccaagggatctccccttttctgcactatctactaggtagactcagaaccaaacaaatggacctgcttgttagccaggtctacagcagcatgcatcacaatgtttagagctaggtctgtaccaaaaggaaagttgtctttcatgcttccaactgtctgaagagcaaggtaacattcagattgttttaatttaaacccgggttcagcccggcgtggtggcacacgcctttaatcccaaatcccagcacccgggaggcaggtggatttctgagttcgaggctagcttggtctacaaagtgaattccaggacagccagggctgtacagagacccaggtttcatcaggtctgtgtgattggctcttttcatagaaagatagaactttattatggacatttttagaattgtcattttatgtaactcttttgctaagtagtttgaaattttgtaacatggcttgtatatcagatttatgttttaaaaaatagcctcttagaactcgggtaggtctcatgcatattctttgccagggattgaggagagaggagagagaagggaaggggaggggcttattagtgaagctaaagcatttccctcccagaattcacactgtagtactggctgcctcgcctgccttaggagtgctgggattaaaggctttattctaccatgcgtgctccagctatcccctcatttttgaagcctcacttttttcaaagcaaaaagttaagacttacactaatgaataggtttgtttcacctacgttattcttgtagagtttttgaagatcattgagtcattttagtagaggaaaatggctactgtagagcatggagcattctgtataataggatgggcttgggatgtttgctacagcacaatggcttcatgagacttaatctccactaagattaaggctgccaaaggcatagtgcagctagatttctactgtgtttcccattcttcagtctggagcagctctttacactgcaggtccgcaggcgctccgtcctgctccgtcgtgctgcagcagcagtgagtactagagtgccaacagtctgtgctgctgctggtctcttactcgacagttaacaatgggaaagagtgcagaaatactgcgaaagcagtgttgaaggtggtggggatatacaaaactctgcctgcaggacttgcctgtctagttactagtgaagacacgttaataataagaacgaattttaataatattactaccactcaaggcctcagggaagactgagttgccaaaggacacattctgaaattagatcatactctaatttttatagcatgtaaatcttgaagattagttttattatttggggtgggggtgtagttgctttgcaaccaaaagatggtactagatcccctggaaatggagttaacagatggtttttcagccaaccatgttctgctgggaattgaactgaacccactcctctgtaagggcagctaatgatctgaaccattaagtcatttctccagccatgtcttagtgttgtatgttttttcttgcagtgctggggattgtgccagagggcacaccctcctccccgacacctcctttaggctggtctcaaacacactgtggagttggggatggccttggactcttcccctctcagcttcaccagtatgattacagctttgaactacatggtagcttaattgctatataggaaccttatttaaagggatgctaaatagaattagaatgaatacttgcatacccaatgaaaagcaaaatttatatacatcaaagcctcttgaattcaggaatttttaatcaccttatagatgagatagtatttgtgaccataaagagaaggcattttgaaagttgactagaaaaataactggatatgctcatagtggaaagaagtttccactagtttagatttaattaacatcattgatctgaaccattctattacagtgtttgcctgaacttaagtttacctttctacttcctttggcatctgctttcctggctgatagagcagagtgatttgatctcaagtaaatgatcatttctttcttttgtggggggtgggggggtggtttcgagacacggtttctctgtgtagcaccagctgtcctggaactcactctgtagaccaggctggcctccaactcagaaatccgcctgcctctgcctcccgggtgctgggattaaaggcgtgcaccaccacgcccggcgataatttcttaagaaaataattgttacttttaagttttgaaattcattcttagcttatatgtgaaaagaagccaatgaaatcatgctgatccttggatgtctttctcttgcttgccccctcctccccttccccccctctttctctctctctctttctttctttctttctttctttctttctttctttctttctttctttctttctttctttctttctttctttctttctttctgtaatagcgagttgcgccagccttgatagacttcttttggagtttaatatggtgaatatttttatctcaaagtgtataactattcatgaattgtcatgcttgaataatgatttaacagttatatttgtttcccttggacttataaaaatttattataacatttatattataaaatttaatgttaatgtttttctccaattacaggagtcagaaataccatcagaggaggggtactgtgactttaatagcaggccaaatgagaactcttattgctatcaacttcttcgacaactagatgaacagagaaagaaagatattctttgtgatgtcagcattgtggtgagcgggaaaatctttaaagctcataagaacatcctggttgcaggcagccgtttctttaagactttatattgtgtttcaaacaaagaaagccctaaccaaaacaatactacccacttagatattgctgcagttcaaggtttttcagtcatcttggacttcctgtattctgggaacctggtgctcacaagccaaaacgccattgaagtgatgacagtggctagctaccttcaaatgagtgaagtcgttcaaacttgcaggaatttcattaaagatgccttaaatatcagcattaaatcggaagctccggagtctgtggttgtggactataacaataggaagccagttagcagggacagcctgccttcatcctcacgggaacagaagatcgccagcttctgggcaacgcggaacctgaccaacttggcaagtaatataaaaactgaaaacgaaggctgtgatgtcgacgagggccaagtagaaaactaccagatgaatgacagtaactggatccgggatggctctcctgaattggctgaaaatgaatctcaaggtaaaacaaaagtgtttatttggaataatatgacctctcaagagactggcaaagcaaggaggaaaaaccaaactacaaagagatttgtttataatataccgcctaacagtgagacaaaggtagaagattgctcagtgatgcagccccctgctgcctacccagaagaaagcaaggccttactcatcaaggaagagccaggtaaggttgtcagtccagttttgtacctgctgaagtttacttttaattattaatgtattagaactaaggatacttagttcttagttttgggtcttttgtgtgtctatgtgagtttaagttttagagtgggtggtaactaaagtaccacctgccaaaagccttattaataactatgtaacagactctttctgacttagggtaaggttgtatctctgtaaacaccataagatcactcacgctgtctttaatctttaagtcagaattgttaatatcctcagcccattgtatatcacagtttgaagagctttcttataataagtgataactgtgttatgtaaatttattagatgctaaccgaaactaaaagtgattttagggtttgccttttcataatttggaaacattttaaattggactctcaaatcccttcatcagtattgtcaaggacagtatcagtattatcctattggcagcctctgcactactttatgacagtgtttagttgtaatgtgtaactaatcactttgtctcctgaaattcagttgtaggatctagttcacatttaaacatttattgttacagaagtttgctgattccaagatgactctttagcgtgactctgcctattacaggtctccagaagcaggaatgcttttcttattgtcacctgactgtcattgtcatttgaacagcttgtggtggggtggactattagcctgttttctgggggtggggctgtttctgtggaattgcagtttttccttccaggccatggagctcttattttcagtatattcctagacagtgtatatactgtgcaagagtcgtagcatgtcatattggtggtaaagacctttttatctatctatctgtttgtttattttttaaatgaaccgagtgaaggacttctagaaaatggaaaatgtagacatttaccttattttaaactggctgtttctaactttgaaacatctcagggatttgacatttcctatccatattttaggtttgtgcaccattagtttagtgatttaatgcctgtttatctcaaggggcttgagttgggtacacttacacttcagcattttcatgacagaggcaggtagatctctgcaacttaatggccagcctggttggtctacagagcatgttccattacagccagggctgtcccaatagcaaacaaaaccatgcctgtttagtgtctatgataatgatggagtattttatgttaaatattcttttacttatccatttatctgctgtttctctctccctctctctttctctctctctctctttgtgtgtgtgtgtgtgtgtgtgtgtgtgtgtgtgtatgtaagtgaaccatagtacacacatgcaaaattcaaaggactgctttgtggaattctcatgttatgaaggttccaggaataaaacttaggttgcaaagcacctttccccattgctgttcttttttccttgtattttatgtcagttcttatcggcaagtccctactgagacttgtgttagagacaggctctaggacaggctggcctctaattcactatgtggctgaggatcacccttctatccatccttagactcttggctttaccttccaagaacagagagtagagggctgtgtnnnnnnnnnnnnnnnnnnnnggataaaacttaggttgcaaagcacctttccccattgctgttcttttttccttgtattttatgtcagttcttatcggcaagtccctactgagacttgtgttagagacaggctctaggacaggctggcctctaattcactatgtggctgaggatcacctttctatccatccttagactcttggctttaccttccaagaacagagagtagagggctgtgtcaacactaacagtagaccccttagctagcactttgtttttggcttactaatacagaagtcttaacaattcaaaactggtaactatcaggactttctgctgcatttagtgttccactgtggtagttaactctgtcaagtgtttaaacgtatgtgtgtatgtgtgcccacacacatacagattttgagcacctggaaatatgcatacaataaaaatcctttggaaaattaagcaggtattttgagtggtggcaggaccaatcagagctaacactgttcttaacaactaccatataatattggagtgacttaaaacaataatattgacccagattggatactttcagaagtctttagcatttacttagcaattattttagcaagcattttcttaccatccatatcaatgcaccaggtctatcaaaaattgtggatagtttaatgagtcagtttatcccatcctaaaaaaagataatttttgatgcttttaaatcattggttgcactttggtacctgaattcataaatttggtttcatcatgacaagctgcatatcaactggtgacacttttataatttgatagtgtctctaaaggagagttacagcatcattcagtggcagaaaagtgggttttctctcacctaaacagtatgcaagatacaggaaaataagaggtcaagctagtgtttgtgtaattcacatatagctcatagtctggccttgctggtgggcagccctgtgagcaagtctgcattttgtgattgctcacaaggctgttccagagccaaagtgctcctatcaaagctctgcctatagtggagaataagaatggacagttgtagggccactcgtttgttctgtatgttcatctagtacaaagagatgaagctggctcctttttaagaattcccataaaacatggagcagcactgagcacctggttttgttagtaagcgggtggcactagcttctcagaagccctcatgactgttcattcacataacaccttccagtgcactttccccagagtaatacagactttcacttccaacatagttttaaagagaggtagaaatatatttcttgtgactttttttcaagtcagtttctctgtgtagccctggctgacctggaacttgctctgtagaccaggctggccttaaactcagagacctgccttacaagtgctgggttcaaaggcatgtatgtgcctttcttgtaacttttaagaatataatgacactaatctttggttagtttctatacctttgtttatataataaaaatcaaaataaattctccaaaagatgtgtcttctagaagacttgagttaaattctcagcacccatatagtgagtcaccaccagctgtaagtcctgggacttaacaccctctgagggcataggcacaaatgtgaaaagtagcgcgcatacatgcaggtaaaaggaaacaggaaagaaaatagaccttattaagaacttgatggtcagaaaatagtgtgagccatttttcttggagtctcactgtgtagctttggctgatctggaccagctccccatgtagcccaggttggcctcaaactcacaaagctgctttgccttccctgtggtgtgattaaagatgtatattaccatgcccagctgggctttgaagcagccctgacaaaaaagctatactttatgtttggtatggttgaaaggcctgtatataaacagaaggaactatttctagcaaagctttgtttagtccttgtcaaaaaaactgtctattaatcttagccatagattggaaaccttgagcattacaggtcaggataacttttagcttagggattccagttgaagttctatgtacggtgagtctacaaatggttgaatccactggtggaataaaagcccaggttcagttagctcttgaaaactgctcctctctgtatagactatgatgggtgtaagttaagctgggtactgtttacagggttatatgaaaattaaatgacaagttatgtctgtgcccttaaagttaaaaaagactattgaagttatttataacagttttccagtgctatgtactttctgccaaatgctagatagatggtcttggcttgctgacaacgatgaccttaagcagcctgtgtgtataatgacagttattagaggttaccttcagtttgagtcaaaattaacttctataatgcccccattctgccatttatagtagaatttggacatagttttaatccctctatctggattagaaatataaataatacctctctgaatccatgtttttctaatttaagtgctatttcatctattattgaatatagagaactgacgtttaactttgcagggaagtttgaccaatataacaagtgtagtgtttatttaaggtatggttgcctttcccaagattagtctcctggtaaaagtaggagccttcaaaatcatgtctgctgttaaaaccttaaaaatgtagttctgaacttgaaaatatgttaacatctatatcattattgtgtttaatttttcacttaaaagtaaaaaatgagcgagacatgcttttgcatgattttaaagctctcttataaacatctgaaaagtactagtgaatattttgaaatctaaattcaatgcttggcatatttagatttgtgagcccttaaaagggagtgtgacttgtatagtttataacgacagctctaagaatgcaccctttgtcccgttatgctgaaacgggggttgcaccttgtaacatcctctgcaggtttgattgagatggcacattttggatctgtaagcaatcatatcttgttggacttaactgctaggcttgattctatccagacatggagggaaccggggaggggtagcatgcttgtcctttgataccgagttgatagatttaaaaactgaacactccttaatcaaataaagggaaaaatgatcttatgatattaaaaaattttaactatctgaaatgaaatctgagatttgaactttagttattaggggtttttcagtcttggtttaaatgcagggccttgttagtgaggtgtgcacttaatccttcatttttatttatttttaaaaattctgacacaggttggtacaatatatcctaccttttgataaattttgtgtatagcttaggaaaaatttgaacttgtgatgctcctgcctcagcttctgaaacattttggtaactcagggtgctgccacaacctgtcttttgattattacatttttgttgttttgaatgtgcacatttgcagagttagtgcagtgcacatttggaactcaggggacaatttgtaggagctggttctctccttgtacttgatggctcccggggaccaactcaggacagtaagtgtggcagtgagggactttacagactcacatctcactggccctggcctcacctttgtaattgatgtatttgcctcccagggaaactgcatataagctggtatttagaacgcagttttgaggaacccgggctcaagctgcatgcctttttgggaagcctaataaagcatatatctgaaataattagtaattctagttatagaacttttatttttaaagttatatgctaaccagcatttctgttctcctatatttatggtgatagttgttcattattatttattaagaaattaacacatctatttatttgtgtgtgtgtgtgtgtgtgtgtgtgtgtttgtgctttgcaacttatggagaattagttctctccttgccatatagctcacagggactgaactcaggtcatgtctttacccactgagatatagctcacttgccattaaaataatattttatgactgttagacatttttgatatctcactattttgaccttgttgttataagtttgttaaaagcagagtctaaagccatggggtttactttggttgaggtgtgagttttacgtgtagccctgtcactggagagtccccagtgtgcctctaatgatctctctaacaggaaatcacaaaaatctctaaaaacccaagctcttaaagaaaattaattttgagaataaaaagtttattttgtgtattttcaatttttttcttgaatgtgaatatacctattttgtcatggagaagcatttctgttgttaaggcagagtctggctatgtacctcagcttagccccttgctgcagtttccccagtgctgcttttacacatctagtctgcatgttgcactgactataactatactataactataactatactataacccagtagggtgttggattaatatgcagtctccatttatgggacttggattcaattccagatatttaggtaaatcttggttttgtttttgtttttttgtttgtttggttgtttgttttggtttttcgagatgggtttttctgtgtagccctgtgtcagaatttttaaaaataaataaaaatgaaggattaaatctttcaggcatctttattgtagagtatgctgtgaaaagtaagccagttttgttttgttttttaaaatcacttttattagaagcatggcttactgcttactttaaaaattgggccatgaaatcttactgaacatacttttttttttttaagatttatttatatactactgaatatttggtttctggcagcaatatattagttggccaggttgttttaaatttctctctctttgaatttttgttttgtatgttatgttttgtatgaatttttgttttgtatgtatggtcactacgtgtatggttggtgccgtgggagctagaagaggaggccgggatggtgctggggattaattagatccaggccctggaagataagctggcgctcttaaaccctgagtgtgtgtgtagacaatgtgcctttcttgtttttttgtttttaataaggtggggcttgcttgcttgcttgcttggttcctgctttgctgactatgcttcgctggctggccagaaagtgtcaggggtctgcctatagagaaagcccagcattggcgcttataagggtgacacaaacaattggtaactgagctaatcactctctaaccacagcagtttgaaaatttttattcttaaagctgtactctttgaaaaaggttataatataacaaatgatattttccccttttcacatcataagaaatctagaaacaaaaattgtaaatctcaagataacaaacaatcacattaaaagaactgaggtatgctcagacttaagactactaatctttgtatgtcaaaggctaagctgtgatctttgttttatgacttggcaaaggagtatttgatctctaattagatttgagttatggagtgtactgactaggtctattggcataaatatgtctttgaatggtgaggaaaagaaactatgatgtctagtataagcaagacagggcagttgcagtctgtcacttgaatcagtgagtttgagtggaaaacaagtttctagggtgctacaggaactagtatttgcatttgggttgtaaatgaaattactgaatgggaaagactaaagagaaaaagatacctatgcctgtttatgaagagggcctgcttttagttctgcaactatctgcagacatttttatatgctatgataatttatgaatgctgtgtttatatgaaaatgaaatttgtgtagatcatttatctcgagttttatatgagtttcagctatttttgtttttttcctgccatcaattcacatgtcattcacatgagtattgggatcctgaagaagccaggctagcctgcgctgcacttagaaatggcgaatgctgaggaccctaagcaaagccaggggactccaccccagacagtgtcacacacaggctctagaatgattcctagccccccttttctgtgctgttaccttggtactaagattaccctcatttgatggtagtaccttgttccatgtgttttataacttgaaacactatactttatagtatttcatttatttcattttacttatggtttcacactgcagttttgtgtaaatattttaaagacagttttaataaaatgcccagactcgccttggacttgaccatcttcccacagagtttcctgattggctgggatcatgaacgtgtgccgtgtttcacagcaggggcaggggaacatggatcatttgggggcaaggagattacttgttggaattaatcatctccttagaggcagatttggggtcctcataggcttagggggaaacctgtcccacaggataccccttcacctcttttggggggggggggtccgtgaagcaggcagcaacttacgtagcttagttggcctcaacttgattcttgcactcagtgttgcagggtatttgatcacactgtggaaaaacctcgagattgtgctgtgtactggaaaaacctgtttttagttgtagtgtggctcagccttagcatacatacacttttaatccaagagctttctgcttgaatattgtaaataaagtcagccataggtcaagagccatttgataggaagggttattaacaacaacaacaaaaaacttagtaaggagtcaagaggactcctggtagagatggcacaggaaggagagaaagaggcatttctgatggttttttaatgcataggggtgttttgcttgcatgtgtatctatgtgtaacttgcttgtctggaacagatggaagcttggatgccagctcccctagaactggagtttcagacagttttgagccaccacatggatgctgggagtcaaatgtaggtccttttgtaggtagagcagccagtgttcttagctttccagcccaagagtaactgctactctcctaacaagactaattcctaaataaagccacatacttgtgaaagcctattaacaacagctagaaaattggccctgagatgtagttttggaatgaagaacaaatgaagtacttggttccttcaagagtcattccttagattaactgtatcacagtgtacttttgattttgtttgtttgggttttgtttgtttgtttggtttttgtttttgtttggttttttgagacagggtttctctggatatccctggctgtcctggaactcactttgtagaccaggctggcctcgaactcagaaatccgcctgcctctgcttcccgagtgctgggattaaaggcgtgcgccaccacacctggctttacttttgattttgaaggaaaacaacacagctgattttggggtgaggaatttcctacctagatctgtaggattaagattacacctggacgttaattttccttcaatgatgggcattgaatccaggggctcatgcatggtaggcaggtgttcactgatccccagcctcacaaaatgacatgtataatactttaggataggagataggaagatttaaagaactagttgatacgtatagatcatgaatgaggccagcctacttaagtgaccacccaaagaaccaaaaaagccagctggttgaggaatgcatgtagcagatcactttagtagaataattcaggaacagaacaagcatgtatgtcaaaccatcttgagagaattatgataaaaggttgtctgaacatttaagaataatgacttccagcagggcatagtggtagagcttttaatcctagcaattattgcagcagctccgtgtgcttggggctactattgggttgcaaaggtcaaagtattctacctcgtgtttaatactagtgtttgtgaagaagagtgaggtactctagctagttatctcctgtcccactgttgcatcctattgagaaaacagatactaacattcttaaaatgtgcctaagctctgctttcagatctctggtgtgtgtgtctgtgtgtctgtctgtctgtctgtctgagggggggagaggagggaagagagagatagagatgagagagatatgcctgaggaggatattttatatcctgctctgccatttgccaccttattcccttgagatacaggctctgtcactgaaccttgctagcaatcccaagcggtcctctttctgtgcgtgaacagtgctaacatacagaagcatccatcaacaccctccccatgggtctgctctgtgttgaatactcctttctctgttcagatgtcagtatctgtaacatctttagggacttagtttcttattgtttctctctcttccatcctatagtcaaatttctgaaaacattcccccattcttcccaacacaagccatttcttttttgtacttgccatgttaaccttccaagtattatcctaagagcattctagatactttgtgaatgggataattctagggtccttttatatacttggcattttttgagtggccttattctttgctccccctggcattgtttatcattatctggtaactcagaccatttttgttatcagcccaagcaccagatctgcagtcccctttttttttttttttaagatttatttatttatttatttttgtttttttcgagacagggtttctctgtatagccctggttgtcctggaactcactttgtagaccagactggcctcgaactcagaaatccgcctgcctctgcctcccaagtcctgggattacaggcgtgcaccaccacgcctggcctaagatttattttatgtatgtattttatgagtacaccattgctgtcttcagacacaccagaagagggcagcagatcccattacagatggttgtgagccaccatgtggttgctgggaattgaactcaggacctctggaagagcagtctgtgctcttaactactgagccatctctccagccccagatctgtagtcttatttattaaatttctgttcttggaaacaagtggaataataaaattcacatttggtggcatttatttaatttgagcacttttacaaaaaagaaaaaaagtccccacagaaagtcagttttcaacgtttagttagaattacttagttggcttagttgacttattacaatacaggttggttactgccaaccggctaacccttttgacaaaggtccctattagtgctggtatatggtctttaaaacccagtacatggatgaagagcagaatgacctgttaggggaaagcaagctgcccttttaaccatctaaacactacttcttaggtgtgttagactcaatgctctagactaaatgtcactctgtaccctctgtcccacctcgagtttgctctgctgccatcggaagatgacctagctaatctttccacaattctaattctgccaccaatccttgtgcttgctacactactgtacctatcagccctcagctttggttcctgagaactgctttccgcccaccctttcctctcttcttttctgcaccgcgacccctgcaaagggcaggcaggcattgggcagcaaatgcacagcctggggctcaggattgctttgtaattggtctctgcatcttctctaagtcctttcattctcattcaatgacaccatgaagtagatttttagaattcaaatagaagagctgtttcttatctaaactacttatatccttttaaaaaacaaagtatggaattcttagcataacccctcaaccactgttttatataactggctcacagtcaatgatactactagttcctcggtatttgagtgattggggttgttataattgtacaccggcgtgtgctgtatcacattccattgtatgaatgaggccatagcagtttatttacatactgtaaataccttctcagtgaaatgtctacttctttacagaagttgtatttactttaggggatccagagcagtcaaggatgatgatgccaaagatgtcttgaggcaaggagatagttgacaagggagggattttaaagtgttttcagatacttaactcccatgagtggaggagggatttagcgccgtaggcaccagctagtattagaagcaggaacctgagtagtaaagtcaggctaaactaaaaagcttattaaatcatattaaaagctataataaaccgttgaatcttaagatgttttattttaagatttgtgttttcagaaagatctttattcttaaactgcagactgtatttggcaagcaaggagataagagctcattggcacaagaggagtgaatgaagccagaatggaaagggtttacatacagcaaattactgataacactgaaaagcacaccccatcgtcatggctttaatagaaatactgcctctctaggtctgtccagtaaatcaagtcaactcttagccaacaacaacaataactgctcttgttaaatctccacctgaaattttaaccaggtctatttttgaacttagaacaactccaatctgcttttttagaacttgtcgttcatattacacgcattaacagttgatcatgattataacattttgttattcaactcaaattcctatatcagattcctatatatgctgaatatacatgagctaacaaggcgtgtagtcacatagccagttagaaaactagggttagtacctgagacacctgggttcttcacagaccattcctaacatttggacatgtctattttcatcatgggttaaaaattcaaattgtgcttaaaaaggtggctcctcctcaggatccaggtttgattcctagcacacacatagtggctcacagccatccacacgtcacgtacatgcactctggaaagacattgatacacaaagcaagtaaatgttcactgttttaggtatttttgtctgtcacataagctaagggtggttacagcatgcttacttacctaggctgtttagttcagagttctgggtttggttcacagcatcacacaacattgcaaataaaagcgtttaattaaaggtatttttcacataatagcacagttttcacaattattaccaagtcagaaataccatggcaagtgagatagcttgtaaaagggtctgctccacaggcctggcattccaagtcctggaacccacactggaaggacagactggactctgcaagctcatacacttacatatgtgggatgcatacagtattacatagttatcgggcattgtgtttagacaacgagaaaaccaaagacaagtaaagtattttatggtggcttcacctggagtttacacgctctgtgtgtggtgttgaaaggcttctgaaccaggaagaaaggactgttcttgggtggctggctctggtgcagtttgtaaatgaactcattgtgtgtcattttcagatttggatggtgcactactctcagggcctgatggtgataggaccatgaacacaaatttattggctgaagcctgcagtggtcaagatgctggggatgctggtaggtacagtaagatctttgtcaagaatgtatctgagaggttctgaagactgtagtgtgctcgtgagcctacttggctagtcgtgtgtaaatgcttccaattggagagcattcttaggttagttatggctgtgatgactttaggaactcggtaaatgtaaactggtaagtttggtttggttttgggggtggtgtctgacacatggcctcacatacatgcacacgtgcacagtcataaaaaaaatttaaaaactcataaaaataaatttaagaaaacaagatggagtctctcagagtttgcagtgtttactgatagaagcaagaagcagcaactaaaggttgtcatctctcatctaaaaagttaaaatgctccaaaatcagaagtttttgagcagcaacataatattctttaaaaaaacaaaatcctagatttgtgagctttcgagattccagaattttagaattagagatatcctacctgcattactatatgaatacgttttgtgcatgcctatattggaaaggaatgctgcaggcgagtcagagttaaaagtgccttgcaatgggagcatagttactaccatggaaaaactaaacagaggtccttattgttggaatgcagcagcccaaaggggcagttggagagaacgctttcatcaggttgtcttggcttggctatagaaagtgcagactcactgtgcgttacatgggtaaccctgttccttgcagcctgtcaggctttgtattagcctggttttgttttgtaccagttttttgaaacagggtcttactcttccttgtctgactttgtttcaacctcccagtttggggtttttattgttttaaaaaaagaatctgtgggaggtgtggtggtacaggttggtggtgaggcaggggtcccaagttaaaggtcattctctgctaccatggcaagttcaaggccagcctgggctgcataaggccatgtctcaaattggaaaaaaaatgaaatggctgtggctgaatgcaaactgggaaattatttggtggccactaaaaaagaagccgtacactagaattgatggttgattggatcaagtggcaaaaactaaagataaatgtatatatctatagatgtctgtgtatatatctatatatccttatacaggaaaaatctttgacccaataaattatatataaattttaaataggattaaattaagaaagaggtaattcctgactgtgttctggttttagttactgtagactaggcctttgttgctgttttctgtggcttttcttttttccattaagctcagactgttggaggttcaggtgtttatatcctttgagtgtgggaattgaatccaggagctcgggtttttgttcgggttttggggggaagacagatgggaaggagttgggtagttttgagattgggcttccttgtgacacatagctgactctgaattcagtcttccaagtatgagccagcacatgcagcttgatttagtttatgttaagataacttatcattgttcttataattgtattttattttctctggctctaattaagagtttttcccaaccattacttcaaaatcacttttcaattgtactaggagcatcacatgatttcaagtatggtttgatgcctggcacttcaagtgatttcaagtatgggttgctaccaagtacttcaaatgacttcaaattcggattgctaccgggtgcttcaaatgatttcaagtatggattattgccagaatcttggcccacacaagaaacgtgggaaaatggcaagtattggtcaactaaacaactacaaaattctaaaattccatgattaagtgcttctgagctgtgttaataattgttattcctatatggttaaatatagtattgataggtgctttctctttaataatatattaaccagtacatttttccctttaaggtgactcatctctaatcatgaacaagttgaaatgccctcattgtagctatgtagccaaatacaggcgaacactaaaaaggcacttgctcattcattctggagtaagatcatttaagtgtgaaatttgtggaaagatgtttactagaagagaacacgtaaaaagacattccctggtaagtgccttgaaacgctgttgatcatggaggtgtgtggttttatgccagggatatgtctgcagatcgtggaggtgcctggcatatacttggcaaatttaaggaagtatgctaagctgctttaaacagaattatttttgaagtgatattgtacttcatttagaaatagtaactatcctttcattactaattgtatggcttaatttgaatggctcaaatgctttctttatctgtactactgttatattgagttcttcctctttcaattaggtacataaaaaggataaaaaatacaaatgcatggtgtgtaagaagatcttcatgttagcagccagtgttggaataaaacatggttctcgacgctacggagtatgcatggactgtgtagataagtcacagccaggaggacaagaagttgtaaatcagggacaagatacagagttccctcgggatgaagagtacgaggaaaacgaaggtggcgagcccgatgaggagctggctgaagacggacaagatgaaaacgatgcacctcgatgggatgagtcaggaggcgtttatgtctctggatgattagctgacctactatgttcctcaagaatgctgcattggacatactatgaatcgacaattcggattgttgaacttgaaggcttgcaaaatatggtacatgctggatggtagttttgttgctgtgaaaaactgtagggttaaagccttatagcaaaaaagaatttttttatatttgcacaggactatacagcaaacaaccatgtggttggatacatggagtcctcacatatttcagtcagttgtcaaagtaaactattttttatttataggatatacagttaactatttgggttgtatgaaaatatagtccttgtcctttacagagcttgcttacattcatgtgccatttaacatgaatgaggaaatccatttatggaagtacaatgacagtgacccaatcgctctgccaatcaaaccactcaggctagtttgtactagtagagttttgtttctatttttattttattaattttattttttttaatacagattttcagtgaggggctttttcaaccccattggttctattttcttgtattttttttttcattttatttgcttcataacttaaaccaagtctcctctagtcttagatattatttcttaatttcgtgctgataggcatgcttataagaactggagaggtaatttattggaatgaactgactggctccccgccctcccttccctttttgacatgaattttactacttcacagatgaagaatgatgttacaaagttaccatggtgacgctgacaaataccactaaactgattatgacttagaagtaactttctcctgctgctctgatctgatagatggttgctctatgatgtgttctgacatggggtctggtttttggggatctgttactttggcactattcttgtttgcctcttagtgtactatacctcagccttatttgaaatacagaagtctaattgaagaatagtcctaggaaaatacataaaatgatttgttttataattcatcccccatgtccagtttggttagcttgttatgcaatataagtgaagtatcaggttttttttctcctgtgcccatttttatcattaaaatgaacacaaaatgtgcattctctttttgtttcatacttaccgggatgttgagtgtttttaaattgtagctgataatatatttttccattccttaaagtcaccacaccttgatgaaatctttatagtctccatgattcagcaatctacaaaaaatactacaagtaaaatgttgagcctttattgttccattatctaaattcctcaggagtcagagttcttcacacagttgagacttagtttatgtagccaggtgacggacgactgagcggacagcagcacgctcagcagcttgtgacaggctaacgtgccgtgtgtcaggagcagagcatatatataaaaaacagagacaccatattttcaactttcttttaaatacaaattgagtatattttcctattttatatcaagtagctaaattatgacagttgtgtggagaaaccacagagctgctttgacagatacaatctttttggtgctccatctgttcaaagttgaaaagttgattttctttttgaaagagacaaacttcatcattgcctctgatttcagtagaataatggtttgatattggacagtgacttcctgcatggataaatcagagatgaagtagtcatgttacatgttgagacccacctattgccctctgactcgtatggcagtctctgcatcccttggggatggcagaagagtttcattctggtttctgtttgaaatgaagagaaccccttattctctgtgtttgaaacaaatgagtgaagtgtaattctagaaaagtccaaagtagactaagttgggcagagatattatgatgaaaaagtattttaaacgtaagatgttgtgctttgtgaatatgtaagtataacataaagatttcttccatcccacctatccccttcctttaaaataaaccatagtttacaattggtagatctgtctatatataaatatatattaaagagcaaatatatatatttaaaaaaagatcacctaaatctgctttattagacagtagctcactgttgcgtagaaactggacgtggctttacattcttaatgtgctttattttcctcaagataggaccttatcttgaaacagaatttcctttattacttaaatcatttatgtatatctggtaaattatgaccaaatttttgttagattgcacacagtaaattgaaatacacatttggtacactacggaattgttgtgcttttgtttggtttcagttggaaacaggttcgatggagatgactttattactgttaatttaaatagtctataattgtccgttgccttttatgtcgtgttgtgacagatttggctatatttttagtcatctgaaatatactttaaaaagtttgtttttaggtaatccaaaggaaaaatgtttatactcttgaatatatatttgcctcagcctatattaaagtttctttgaagtaaacactttaccagaaacagaattgacagatttttctacttgctgactgcctaagttattttgtttcatggtcttgagaattgccttttctctagacctttttttaaaagtagttttagtactaaggtatactactggacgctcctatttttttaagtatattccttttctgacagtacaacttcaggaagttgataaatctctaagaagttttgattggtctcagaaaggtaatggattgaatactcagaattttgtctgaaagtctggcagagttgtacatttggtgaagtttttcatgtaatttatattttaaataaaatatttttagagtttttaattttaatgaaggggaagaacatacactttcatattccacagtggtaatgatactatgtcataggttcagatcatgtgttattctcccagacagtttcttccatatggtctctcatttgtcaaggttcttgactcaatttttttactagacaagttgctaaattttagcaccctacaagagctctgtgtgtgtgtgtgtgtgtgtgtgtgtgtgtgtgtgtgtgtgnnnnnnnnnnnnnnnnnnnntgggggcaaatgctatttggcttaagtagagccatcctaataaagagtgagttaattcattgcagaaaactcaagcacagtaagtacacagtgcatattagttgtttaataacaaatgtgaaccaagagaagaagtaaaagctggtaggaagggataaatcagggaagtgaggggccgggacttgcaaagggccccaaggatgaggagtgggtgtgggaggcctgacaggaaggaagctctgggaaacatggagtaagagatgtagttctttggtttatgactcaaactttctggtatgcccacacttttgtgttgtctgccttactttaacctataaggtaggtgctattctattttacaaataaggaaaggctcagagagattcagacacttgcctaaatgaccgcagctttctgtggagcggggattagtcaggtctggttcgaagccctgatttcctccctgtgagatgctctgttaggagtcctgttctctttggaagttgcttttgtcacttttgactcaagcacacctcactgccatcctctgtgagtggctgggatagtttcacttaattttaaaaggatggttttacaatatgaagaagtagatagaagccccagcttgtgtgccgttcacacccggatccttaagcttaactatggtacccaatctacacagttagaactaacaggtgttttcttagtttaggatttaaagtaggattatttattttgtttcttccctatctgctgtatcccagtcttcaagtgaagttgaactaggtagtttaaaacatgttagggataagcacactttgaaagatgttttcttgccctgaatttgagggcactgggcagtaaatttggaatacactagctattgagaacaaaatttgggggttaagaaagggatgattgaggccattatgatctgggagaagcagcatcctaaacactgtaaacaactcttctgcctgctgtttgtaaaagctctctggcaagatcttttacaaagaccaattttcttttttaaatgtaatttacctacctaatatttaaatgtcctgagacatgtatgtaaacttccaaaacctgtttgtctgtgtatttagaaaatacacaagaatctttatcaaacataaaatataaacttgtgagcactaaactgcttctggctttgtgaattttattgacccttaattgtgatttatttgcaggggtgctagtttagactcactgggtaagggaaccaccgttggaaggttagacactgagatagatgcctttgtacttggagtttacgagtttggattacagagtctgaggagggttgctaatggttccttggtatggaagtaagaaataaagctacctctttgcaagaattcttattcattatacttttagaatttttacaggatttaagaaacactgaaaagttccctctaatcacttctaatcgtttctcttggaaatgggatcgagactcaaaggtgaagcactacctcatatatactgtttattagacagaacatcaacttgtaaacaagtaaatatataagattacaaatttcaagcctttgaaaatttacttagagagttgcctctttgctgggcagacctcacctcagactcaaggtcatgtgtcccacccagcctctgaattccaggactaactaatgccgtctactgcaaccaaccttttgagttactaatgaaacagaggttggtgatggcgttggggttacggaggcacggtgcatgtgttgggtatggaattaagatgtgttcggtgtggtttcaagagggaatgattaggagcacttaagattaaaaagcagatcccagcactcgggaggcagaggcaggcggatttctgagttcgaggccagcctggtctacaaagtgagttccaggacagccagggctatacagagaaaccctgtctctcgaaaaaccaaaaaaaaaagattaaaaagcagttttgaagttttcaaagatgagatggggcagagcagttccaccactgagggttctagatgtgaaaaagattgacagccaccctggctaaagcagtattagccaaataggtttgtttcacagtgagtcttaatacttctagagagttagaaccatgatagttgccaactttatcttcttgcttagtacatgaagtaaaattgataaaatgtgttctatgtatgtgcagacatcttaagacttgttttaatgctagtaggcaatttagaagtcaagtttagccttaagtaaaatgttatgtaagcttttcactacaaatcactgtcatagtgggagctggcaaaaaaataaatatatatatatattggacttatcacaaaatggttttagaactaagcgtggcatggtggctcactttaatcccagcctccttggaggcagaaaccacaagacttctgtaaagttgaggctcgcctggtctaaatactaggttctagagcagccaaaactacagagcacacatgtctcaaaaaaacaaaagaattctttagttttagagtttagtcactgccatgattatcaccctataaattctagagttattaaaacgaactggaggaaatctaaaacaaggtggccccgagctggctacgaggagactgcctctgaccctagtacacgaggtagagagacacctgagctcctaacagcaagtttttccttccacagggtcatagttcagtttcttcaaaatatggttcagtcttaaaacttgacaataagaaaaggtgctgattttcagttttattcggtgtctgctaggtcttagggacagaagactgatttcttggtacacatcacagcagttacaagacaagtggaaaattgagtcaaacagaacccgagagttccagggcccaggactcctgaaacgtccttcagtatgcctccaacttgttccatttggaagtgttgcctgctgtgagataacagtggtcacttgagccttagggaccaccttttctaccaagtatagaacacggctgacaggccatatttcaagatgaaatgaccaaacaacctgcagcaaacagcattgatttatatttacactatcatcaacgtttagaatgcttcaaaaccactggaccaggcatttttagttggcaagttttttgtacttgttaagaggcatattggattttgtcatacgagagttaacccctgtcaggttgtccccgtgtttttaaaattgtgtatgcaggcttggatgccgtggtccatataaaagttaaaccatgaaagactaacttagtggggtcatttctttctgcttttatgtaggttccaggggttaaaaaacctttattcactgggtcaactcccagcattgttttgagacagggtccttagctgcagctagcccagactgctgtaaggctcaggctgaacttgctcatcttccacactgctagggtttacatgcgtgtgccaccacgctgcttttgcaccccttaatagtcaagtatttgctcagttctaattatcttgacacgtgcatccgtacgagtcggtgattccttcctactcaggactctgatcagtgtaggaactagcagacttgttttaaggagacaacataaatctctggccatgagagcactccaatgggcagcacagactagccactgggccacatttggatattgaaaaatgccatctcctcataaccctgatgacttctttcctttctaaggctggaggtgtacagtaggaaaggctagcaccatcaactaacaagcataagaccctttctatcacagtattgattaagtagggagaccttaataggcagccaatggttccctgccctgctgtccaatgtgtttccctgtctcgacaccctggttcccaagagggaaatcacaaatccatccagttcagacttttacttgctgattaaaaccagggacctttgtaatacaggtgaatacaatcctggctcagctcctgaatgctcgaattacaaatgtgaaccaatacacctgtctagaagctcgggtggggtggggtggggggaatgtcgaacctgggagtacctccctccacctgacctttcctttctgggacatggtctcttgctaaatgtggttactctgttggccagcaaaaactccagaaatctgtcttcacatcctccatgcaagggctctggacttgcaaacactctaccaactgccttttccctgtaggtccagctgtgattgggtgttgtactgctggctcacgtccttacattaatatctattcaatgccattatttctaaagtttgtaacctgaaaaccctgggtagagctgccgaatgaatgaattcctaacaccgagtgctatcaaattgaaccagaaatctgttatcagatgtaccgatttcctgtaagaccatacaaggactcagattctgtggaggtgtcaataaagacatgctaattttttaagactgaagatcttactacatattttccatttaaaatacactttaaaatagtgatggtgcatgctaataaaccagcacaagtgggtagaggcagaataatcggagttctagtgattgactgtataatgagttcaggaccagccttgtttgcaaaacactaacacatttctcttcatattaagattaaacttaagagctgcactctggtttcttttcagattctatgtcttttactccgtagactttaggggatatggatgtagctcagtaaggattacttgcctagcatgtgcaggccctgggttcaacccctaaatgtccatgagtttggttctaaaggatctacagttctgttgctggggctacggagatggcttagcactggctgttcttgcataggagcctggtttaatccccagcacccatggggcagctcacagctgtaactcctgtcccatacatgcaagcaaatcacttaagatgcattaaaaacagaaaagttctgctgctcttccatctaatgagacttctagcaggagtgtctataatcagaaaaggcgtggcagaatactgctggggacatggtcactggataatgactgaggttgctatggggtcacatcctgctcagcgcatcacagcctcaatgctggtgtcagcaggtaaatgaaattagtaaatgaaattgaaaaagcttctaaaagctaattgctaagtccacccagtcagcattattgagcattactaatggctgcatccattgacactcctttatttgacctcatagaattggccgttccagctttgttcaaatggtgcatacctctaatcccagctatttccaaggctgaggcagaaggacctagtgtgaggagtttgaagccagcctgggctacatagacccaatacaaagtggaacaaatgatggcgatccctagcattctttcctgtagtgttcctttcagttatagtgaccacagtggttaatctttgacttctccccgacctcttgtcagagctcctgagtatttagatggcaccacatctaaatgtcatttggtgcgcacaggatcctctggcatactccctacttaagtaatggctccttagttgctactggacattgtttgactccattacagtgaactgatagttacacggcaaggccacttagaaagatgaactactttgggctggggaatgtggctcagttgctggaatgctggcctagcgcatgcagagccctgggtttgatttcctatgccaggtaaacccaagcaccattgtgcacagctgtaatcccagcactgaaccggaggcaggcgggctgtgtagcaaggtggaagccaccctgtgcccagctggatcagcacgtgtgtgtctctcacaactacaacgggaagaacatttcaggagtgccccacaccatgttcttttagttggaaccttcagtaattcttccttgagctacgtgaagtagaaatctactttcttggagctcccactcagtaaccctccctcccatctccagaagtcgccattggaagggatgcgctctcccgtgttcagtagtggactcgggaggaggtataatggatctgagccatgcttggtgccttagcagttgatcatgcctaggaaagagtccactttctgtgtgagaaccccatgttgcctgttcttggaatgatttaggcatcactttgagcctaagagttgaacagttaatgtgaaagactagtgcaaacgagaggggacagagcacctagagagagctctgtaaagcaacatgtgacttggctgtacttggttggcgcttggagaagccatcttaaccttatgttaaacttgcaacgtggaatcaatgtatatgtgctttaagaatttcataatttggtttaatgcagcatattttaatacatgtttaattactaaattccttccagaagatatattgcagaagatgaaaggctttcttctttaattgcatttcagatcagtatctaaaggaaatgagaaatacttttatctttcttattaaattcttatgaaaccaaatctcaaagtctcaagcctttttctttcgttcttttttccttttctttcggtttttcgtttgtttttgttttgctttttttttcctttttgagacaggttgtcctatgtcgctattcctgactgtcctgaactcactatgtagaccaagctgacctcaaactcagagatctgcctgcctctgccttccaagtactgatgtgaaggccgccatgcctgagtctcaagctgtttcttcctgggcttcttttgttctttttatacagtacatgcacacttgtgtgtgtgtgtgtgtgtgtatgcgcacgcaagatgtgcaagatgcacacatatgcatgacagaatgcttgtaagcacctgttgcatcagtgtcctgctctgtcactttccaccctattctcttgagataggtctctccccaaacctagaccaaggctgccaggcagcaatgatgtccccacacccagcactgctgggattacaaatacatagattcatgcctgaccttttatgtgggtgttggggtttcaaacataggaccttttgtttgcacagcaagaattcatccagttggcatgtccccagccttgtttttgttttttgttttttgttttttgtctttgtttttgtttttttgaggtctcacagagctaaggtttgccttgaacttgctgtttctgaagaactgttaattttttactttttttttttttttttaagatgtctgtctggtgggagaatggcagcaggcctgtttttatagccaatcctgacatttattgctcaatagcatatttctgaatttcaaccttcaaatatatgagtcaagttgagcttggtggcacatatctgaaaccccagcattcaggaatcctgaggcaagagaaccttaagtctgaggccagccttgggctacatgagaagaacctagatagatagatagatagatagatagatagatagatagatagatcgatggttagataggtaggtaggtagatagatcatagatagatagatagatagatagatagatagatagatagatagagaaaccccatggtaatagtttccccaaatgtacttcccaaggtttattgcacaccatttgaaagagactaccacagacttcatctttctcttgttgaagaatccaagactaggagaaaatccacggcgatgcaaagcagctgcgggactgtgtgtcagagcgctgaggccgccacgccatttgcagtggctctgacaggagcagggttggactccagcctctccctcactgagacagcagtggagttgaaggtcctgtgtgcttttctcctggtcctgccactccctgtttcgagttctacgtaagccgccatttcttcagaatatggttgcttttgtttgctttcttttatggctgtgagatgcattcagcctacgtctcggcatgccaggcacacatgcagagttttgtattagcatcatgactgtatacctcaaaatggctactggtggaaatgagcacaaataatgtaggcaagcagaaaataaataaatatgcataaagctgacttattactgaaaaagtctgttccctacatatatactgacagtaacttgaagaaattcagatttgatgttccaagtatatgatatagtaatatatatagccatttagtaatatcctgctgtactggctagttttgtgtcaacttgacacagctggagttaccacagagaaaggagcttcagttgaggaaatgcctccatgagatccaactgtcaggcattttctcaattagtgatcaagggggaaaggccccttgtgggcgggaccatctctgggctggtagtcttggttctataagagagcaggctgagcaagccaggggaagcaagccagtaaagaacatccctccatagcctctgcatcagctcctgctccctgacctgcttgagttccagtcctgacttcctttggtgatgaacagcagcatggaagtgtaagccgaataaaccctttcctctccaacttgcttcttggtcatgatgtttgtgcaggaatagaacccctgactaagacacctgccttttaagaagtcctatttaaactagcctggaactgagtactagctcaggatgtactcgtactcacagaagtcttgtcttaatctcatgagtatgtgattaacagggttgggtcacagtacccagttgctgtcctgattttgtgtgtgtgtctggggtgctggcgatcaaacagagccttgtgcaggcgaggagagctctcgatgtcccaatttctttacctaccacgaccactactattcactattaataatagtcactggacttctattagccttgtagccgtccctccctgagattttactcattcactactaggcgtggttgcatttgcacgggccaggtgcatgtgtggacgtggttgcatttgcacgggccaggtgcatgtgtggacgtggttgcatttgcacgggccaggttcatgtgtgggcgaggttgcatttgcacgggccaggtgcatgtgtggacgtggttgcatttgcacgggccaggtgcatgtgtgggcgaggttgcatttgcacgggccaggtgcatgtgtggacgtggttgcatttgcacgggccaggttcatgtgtgggcgaggttgcatttgcacgggccaggtgcatgtgtggacgtggttgcatttgcacgggccaggtgcatgtgtggacgtggttgcatttgcacgggccaggtgcatgtgtggaggtcagctctctccttccaccttcctgtgtgtttcagggaccaaagctcaagttgacaggcgtgcagagcgggcgcttctcctgctgaggcatctcactgtgcaaccaactcttgaggggaagagtcaggcacttgcagaagagggccccacgggagggcaaggtgaatgagacatgcagtgactccgacgtcaccaagctgggttacagtgtgtggccgagcagtcacggggcattttcttttctcagggctttgagatgagctggatcctgcatttcatgcttcatgttggaatcacatacattgataaaaggctttggttggggaactttcttgggtcaccctgtttgtcaccctgttttctgaaatcattcatgagagcacatggctctctccatgctgagaatcaaacgtagagccttatttaccctggatactttgggtctcagctacactttcaacgcctgattcatctttattattattgcagtgggagggacagttaggtttggtattgggtttgttttgtttgtttgtttgttttgtttgttttgttttgagacaggctttctctttagtcctggctcttctgactaggctggccttgaactcagagatctgtctgcctctgcctccctatatatatcttactgtctttattggcaaaattccttctgggggatgattgattatgggacatcatggtgtcagtatctagcattcaaaaacctcttttgagatttttatttttattttatgggggtttgcctataatatgtatgtctgactgtgtatccttcagtgctcacagagaccagcagagggggtcagatgccctggaacaggagttaacaactagttgtgagctgccatgtgggtgctgacaaccaaatctaagtcctttagaagagcagcaagctatctctcggctgcccatgctcttccctgctgagccttctatagctctggcattggcattttagagccgaacaagatcacaaggtttattttttaaccacaagcacaaggagcaaagcttaactttatattaaagaaaaaactaaagcaattgaaactaaaaactaacctactgaggcttatcattagtaattttaaggtatttctcccagggattaatatgtagcatatgtttaaggcctttgtaattcagggatgaaggctacccaaagatttctaagaaagtaatcgtttcctgactgtctctcttcactggaaatctattgaggaaaaccctgaaaagaagattcgaacacagagtttctgacttgtaaatgttatctgggaggtttctaaataagtcacggttagatatgagctggctttacttgtgctaagcaggtctattgggtgactaactgaaaaatgttttctttcattgtgagaattatgagaaatatgattatgagaatactgttgctggcaattgtatttctttagccctaatagaaacattttattttccatcagtaaatattgatctaaatttatatgtatgtaccttgtcttttacagtgtctatacaaatacattttgtaagtaatctacataaggtatttataatgtgacttttgtttgagcgggacctcattcctaaccatggctggcctggagctgtggtctcttgtctctagagatcaggcatttccaacaagagatgccaccctggtgctccgggggtcttagttttgggagggagcgttttctttggtcttgtttttgcttttaagacagcatcttatatatctcagacaggcctcagacttgctgaagacgaccttgatctctgcagccctgtttaccacaggcctgtgccaccacacctgaagttttaaagtttatacat

SEQ ID NO: 1691 - DNA, 6452 bp, Mus musculus
  misc_feature (1)...(6452): n = a, g ,c or t
gccggcgcggccgccgccgaggacgtcaaggagttgctgctgctccctcaggacacgggcggcccctccttgctgggcggcggcgcggggggccccctgctagcggaaaggaaccgtcggactctggccttccgcgggggaggcggcgggggtctcggcaacaatggcagcagccgcggccgcccggagacctcggcgtggcccctcaggcatttcaatgggcgagggccggcggccgtggatccggagctggacgcgctggaggggaaggagtggatgcaggacggggcgtccctgagctacagcaccgaggaggagggggcgagcccgggcgatggcagtggggcggaaggcggcagctgcagcagcagcaggcggtcgggcggcgatggtggggacgaagcggagggcagcggtgtgggagctggcgaaggagagactgtccagcacttcccgctcgcgaggcccaagtccctcttgcagaagctccagtgctccttccagacctcttggctcaaggacttcccttggctgcggtactccaaggataccggccttatgttctgcggatggtgccaaaagatccccgaggatgggggcggcgtggaccttacccaggtggggcatgatgagctttcgcgagggacccgcaactacaagaaaaccctgctcctgaggcaccacgtctccaccgaacacaaactccacgaagccaacgcccaggagtcagaaataccatcagaggaggggtactgtgactttaatagcaggccaaatgagaactcttattgctatcaacttcttcgacaactagatgaacagagaaagaaagatattctttgtgatgtcagcattgtggtgagcgggaaaatctttaaagctcataagaacatcctggttgcaggcagccgtttctttaagactttatattgtgtttcaaacaaagaaagccctaaccaaaacaatactacccacttagatattgctgcagttcaaggtttttcagtcatcttggacttcctgtattctgggaacctggtgctcacaagccaaaacgccattgaagtgatgacagtggctagctaccttcaaatgagtgaagtcgttcaaacttgcaggaatttcattaaagatgccttaaatatcagcattaaatcggaagctccggagtctgtggttgtggactataacaataggaagccagttagcagggacagcctgccttcatcctcacgggaacagaagatcgccagcttctgggcaacgcggaacctgaccaacttggcaagtaatataaaaactgaaaacgaaggctgtgatgtcgacgagggccaagtagaaaactaccagatgaatgacagtaactggatccgggatggctctcctgaattggctgaaaatgaatctcaaggtaaaacaaaagtgtttatttggaataatatgacctctcaagagactggcaaagcaaggaggaaaaaccaaactacaaagagatttgtttataatataccgcctaacagtgagacaaaggtagaagattgctcagtgatgcagccccctgctgcctacccagaagaaagcaaggccttactcatcaaggaagagccagatttggatggtgcactactctcagggcctgatggtgataggaccatgaacacaaatttattggctgaagcctgcagtggtcaagatgctggggatgctggtgactcatctctaatcatgaacaagttgaaatgccctcattgtagctatgtagccaaatacaggcgaacactaaaaaggcacttgctcattcattctggagtaagatcatttaagtgtgaaatttgtggaaagatgtttactagaagagaacacgtaaaaagacattccctggtacataaaaaggataaaaaatacaaatgcatggtgtgtaagaagatcttcatgttagcagccagtgttggaataaaacatggttctcgacgctacggagtatgcatggactgtgtagataagtcacagccaggaggacaagaagttgtaaatcagggacaagatacagagttccctcgggatgaagagtacgaggaaaacgaaggtggcgagcccgatgaggagctggctgaagacggacaagatgaaaacgatgcacctcgatgggatgagtcaggaggcgtttatgtctctggatgattagctgacctactatgttcctcaagaatgctgcattggacatactatgaatcgacaattcggattgttgaacttgaaggcttgcaaaatatggtacatgctggatggtagttttgttgctgtgaaaaactgtagggttaaagccttatagcaaaaaagaatttttttatatttgcacaggactatacagcaaacaaccatgtggttggatacatggagtcctcacatatttcagtcagttgtcaaagtaaactattttttatttataggatatacagttaactatttgggttgtatgaaaatatagtccttgtcctttacagagcttgcttacattcatgtgccatttaacatgaatgaggaaatccatttatggaagtacaatgacagtgacccaatcgctctgccaatcaaaccactcaggctagtttgtactagtagagttttgtttctatttttattttattaattttattttttttaatacagattttcagtgaggggctttttcaaccccattggttctattttcttgtattttttttttcattttatttgcttcataacttaaaccaagtctcctctagtcttagatattatttcttaatttcgtgctgataggcatgcttataagaactggagaggtaatttattggaatgaactgactggctccccgccctcccttccctttttgacatgaattttactacttcacagatgaagaatgatgttacaaagttaccatggtgacgctgacaaataccactaaactgattatgacttagaagtaactttctcctgctgctctgatctgatagatggttgctctatgatgtgttctgacatggggtctggtttttggggatctgttactttggcactattcttgtttgcctcttagtgtactatacctcagccttatttgaaatacagaagtctaattgaagaatagtcctaggaaaatacataaaatgatttgttttataattcatcccccatgtccagtttggttagcttgttatgcaatataagtgaagtatcaggttttttttctcctgtgcccatttttatcattaaaatgaacacaaaatgtgcattctctttttgtttcatacttaccgggatgttgagtgtttttaaattgtagctgataatatatttttccattccttaaagtcaccacaccttgatgaaatctttatagtctccatgattcagcaatctacaaaaaatactacaagtaaaatgttgagcctttattgttccattatctaaattcctcaggagtcagagttcttcacacagttgagacttagtttatgtagccaggtgacggacgactgagcggacagcagcacgctcagcagcttgtgacaggctaacgtgccgtgtgtcaggagcagagcatatatataaaaaacagagacaccatattttcaactttcttttaaatacaaattgagtatattttcctattttatatcaagtagctaaattatgacagttgtgtggagaaaccacagagctgctttgacagatacaatctttttggtgctccatctgttcaaagttgaaaagttgattttctttttgaaagagacaaacttcatcattgcctctgatttcagtagaataatggtttgatattggacagtgacttcctgcatggataaatcagagatgaagtagtcatgttacatgttgagacccacctattgccctctgactcgtatggcagtctctgcatcccttggggatggcagaagagtttcattctggtttctgtttgaaatgaagagaaccccttattctctgtgtttgaaacaaatgagtgaagtgtaattctagaaaagtccaaagtagactaagttgggcagagatattatgatgaaaaagtattttaaacgtaagatgttgtgctttgtgaatatgtaagtataacataaagatttcttccatcccacctatccccttcctttaaaataaaccatagtttacaattggtagatctgtctatatataaatatatattaaagagcaaatatatatatttaaaaaaagatcacctaaatctgctttattagacagtagctcactgttgcgtagaaactggacgtggctttacattcttaatgtgctttattttcctcaagataggaccttatcttgaaacagaatttcctttattacttaaatcatttatgtatatctggtaaattatgaccaaatttttgttagattgcacacagtaaattgaaatacacatttggtacactacggaattgttgtgcttttgtttggtttcagttggaaacaggttcgatggagatgactttattactgttaatttaaatagtctataattgtccgttgccttttatgtcgtgttgtgacagatttggctatatttttagtcatctgaaatatactttaaaaagtttgtttttaggtaatccaaaggaaaaatgtttatactcttgaatatatatttgcctcagcctatattaaagtttctttgaagtaaacactttaccagaaacagaattgacagatttttctacttgctgactgcctaagttattttgtttcatggtcttgagaattgccttttctctagacctttttttaaaagtagttttagtactaaggtatactactggacgctcctatttttttaagtatattccttttctgacagtacaacttcaggaagttgataaatctctaagaagttttgattggtctcagaaaggtaatggattgaatactcagaattttgtctgaaagtctggcagagttgtacatttggtgaagtttttcatgtaatttatattttaaataaaatatttttagagtttttaattttaatgaaggggaagaacatacactttcatattccacagtggtaatgatactatgtcataggttcagatcatgtgttattctcccagacagtttcttccatatggtctctcatttgtcaaggttcttgactcaatttttttactagacaagttgctaaattttagcaccctacaagagctctgtgtgtgtgtgtgtgtgtgtgtgtgtgtgtgtgtgtgtgtgnnnnnnnnnnnnnnnnnnnntgggggcaaatgctatttggcttaagtagagccatcctaataaagagtgagttaattcattgcagaaaactcaagcacagtaagtacacagtgcatattagttgtttaataacaaatgtgaaccaagagaagaagtaaaagctggtaggaagggataaatcagggaagtgaggggccgggacttgcaaagggccccaaggatgaggagtgggtgtgggaggcctgacaggaaggaagctctgggaaacatggagtaagagatgtagttctttggtttatgactcaaactttctggtatgcccacacttttgtgttgtctgccttactttaacctataaggtaggtgctattctattttacaaataaggaaaggctcagagagattcagacacttgcctaaatgaccgcagctttctgtggagcggggattagtcaggtctggttcgaagccctgatttcctccctgtgagatgctctgttaggagtcctgttctctttggaagttgcttttgtcacttttgactcaagcacacctcactgccatcctctgtgagtggctgggatagtttcacttaattttaaaaggatggttttacaatatgaagaagtagatagaagccccagcttgtgtgccgttcacacccggatccttaagcttaactatggtacccaatctacacagttagaactaacaggtgttttcttagtttaggatttaaagtaggattatttattttgtttcttccctatctgctgtatcccagtcttcaagtgaagttgaactaggtagtttaaaacatgttagggataagcacactttgaaagatgttttcttgccctgaatttgagggcactgggcagtaaatttggaatacactagctattgagaacaaaatttgggggttaagaaagggatgattgaggccattatgatctgggagaagcagcatcctaaacactgtaaacaactcttctgcctgctgtttgtaaaagctctctggcaagatcttttacaaagaccaattttcttttttaaatgtaatttacctacctaatatttaaatgtcctgagacatgtatgtaaacttccaaaacctgtttgtctgtgtatttagaaaatacacaagaatctttatcaaacataaaatataaacttgtgagca

SEQ ID NO: 1692 - protein, 720 aa, Mus musculus
AGAAAAEDVKELLLLPQDTGGPSLLGGGAGGPLLAERNRRTLAFRGGGGGGLGNNGSSRGRPETSAWPLRHFNGRGPAAVDPELDALEGKEWMQDGASLSYSTEEEGDGDGSGAEGGSCSSSRRSGGDGGDEAEGSGVGAGEGETVQHFPLARPKSLLQKLQCSFQTSWLKDFPWLRYSKDTGLMFCGWCQKIPEDGGGVDLTQVGHDELSRGTRNYKKTLLLRHHVSTEHKLHEANAQESEIPSEEGYCDFNSRPNENSYCYQLLRQLDEQRKKDILCDVSIVVSGKIFKAHKNILVAGSRFFKTLYCVSNKESPNQNNTTHLDIAAVQGFSVILDFKGNLVLTSQNAIEVMTVASYLQMSEVVQTCRNFIKDALNISIKSEAPESVVVDYNNRKPVSRDSLPSSSREQKIASFWATRNLTNLNIKTENEGCDVDEGQVENYQMNDSNWIRDGSPELAENESQGKTKVFIWNNMTSQETGKARRKNQTTKRFVYNIPPNSETKVEDCSVMQPPAAYPEESKALLIKEEPDLDGALLSGPDGDRTMNTNLLAEACSGQDAGDAGDSSLIMNKLKCPHCSYVAKYRRTLKRHLLIHSGVRSFKCEICGKMFTRREHVKRHSLVHKKDKKYKCMVCKKIFMLAASVGIKHGSRRYGVCMDCVDKSQPGGQEVVNQGQDTEFPRDEEYEENEGGEPDEELAEDGQDENDAPRWDESGGVYVSG

SEQ ID NO: 1693 - DNA, 41498 bp, Homo sapiens
tttgtttttttgagacagtgactctattgcccaggctggagtgcagtggtgagataaaggctcactgcagcctcctgggctcaggcatcctcccgagtagctagaactacaggtgcgcgccaccattcctggctaatttttaagttttttgttgaaacgggagtctcgctatgttgcccaggctggtctcaaccttttgggctcaagcaattctcccaccttgacctccccaaaatgctgggattacaggtgtgagccactgagcctggccgttattactcattttgatcaccaatcagttctcctttttataccttcagagactttgtggccatcaggttctttgaacattctgagcctatttctcatacatgcagtttttctcagcttcacaaagacactcttaatatcttgtcttaaaaacatggaaatgagagttttagaattctttaggcaagaaatcactttgagtctaggagtactaaactcctattttcccaattatttctcaaagagtcccgtttctgagaggaatttggccacatcttaacacagtcatgtactgcatgacgttctcaaggatggactgcatttatgataatggtcccataagattatagcggagctgaaaaattactatcgcctggtgatagcgtaaagttgtagcgtactttgttttgtaatcccagcactttgcggggccgaggtgggtgaatcacttgaggtcaggagttcgagaccagcctgaccaacatggtgagaccctgtctgtacttagtgtagcctaagtgtacggtgctcataaaatctacagcagtgtatggtaatgtcctaggcctttcattcagtcaccactcactgactcacccagagcagcttccaggtatgccagctctgttcatggtgagtgccctataaggtgtgccatatttttactgtacctttttcatgtttagatagattagatacacaaatactattgtgttacagttgcctaaagtattccttacagtaacatagtgtacagatttgtagtctgggagcaataggcccaaccatatagcctaggtgtgtagtaggttataccatctaggtttgtgtacgctaaggcacagtgacaaaatcgatgcatctctcagatcatatccctctcgttaagtgatgcataactgtatgtcatgaaaggttactttcctctaagtaagaaaagtatctttttgttaatcccttggtagttaccaaaaagttaatccttctgttaattggaccttggttattgtggactgttcatgggaaagtcttttaaaacatgctttctgagtctgtgttttgagccttctatttccgaggtgtccctgtatttataaggatgtgagggacaattaatagtttaattttgagtaacaattgactacatcgtcagagtcaggtttaatgattagctcattcagtatctgaccatttggcccagaagactttaaaattccttaataacagtgattaccagttattcttggtttagaccactttctacctaattgtgaaattttcatagcctaaatcacacatcctgtcaactcttcctgggagaaacatgcatccaaatgtattattgttgtaaatttagttaacctttacagaaactaagtaatgaattcagaccagtgatctgattgaaatttccagttggaatatattgatgtcagtagctgagcaaacaaaagaatgtaaggcagatctatcagcctaatttgtttatggcagaaataagggcggaaggttggttggttggttacttggttggtttttaacactttaggaagaaagtctgaaagacctttcactgaggaaaaatcgattagagttgagcctgtagcccattaaattccgttgtttcttatttatatattttacattatttataatttattctttgtgttttattcagtaacagctagttcatagcccttgtgcttttcaaacttgttagcagtgtctgactgtataccttattgtgtacctaggattagcttccttctccatcttaaatttagctgtattaggttggcaaagcactggagataaaaatctgtatgttttgttaacattcattctctctgccctcaaggaacttgtagtttagtaaggagagacagacatgaccgaaaaaagacacagataacatggtagcagtatataatcagggtacattgaagaatttttttttttttgagatggggtctcacttgtcacccaggctggagtgcagtggtgtgatctgggctcactgcaacctccgcctcctgggttcaagtgattcttctgcctcaacctcctgattagctgggactacaggcacatgccaccatgctaggctaatttttgtatttctagtagagacggggtttcagtatgttggccaggatagtctctatctcctgatctcgtgatctgcccacctcggcctccgagagtgctgggattacaggcgtgagtcacgcacccggcctgaagattcttaagggagtgatcagttctacctgcaaaggttggaagaagcttgtacaactgattcttgaattttaattgcatttaattaataggtgttgaccaggatggggagggcatttaggcagtgcaattagaaacagcctaaggaggagccaggcgcagtgagtggttcatgcctgtaatcccagcactttgggaggccgaggtgggtggatcacttgaggtcaggacttcgagaccagcctggccaacatggtgaaaccccgtctctactgaaaatacaaaaataagccaggcgtggtggcaggtgcctgtaatcccagctacttgggaggctgaggcaggagaatcacttgaacctagcaggcaccccactgcactccaactggggcgacaagcaagactgtgcctcaaaacgcgcgcgcgcgcacacacacacacacacacacacacacacacagcctgaggaaagtgaagaatggtatcttagagaagggagagtttggttgctgtgcaggatgaaaaatcaagtttgaatagatagactggaggtcatggaggatctcttgtcatgctgaaaacattaaattttattgtcttaacaaatgggcaacaatagcagttttaagcaggggagaatcattatcaaatgtgtatgtgtttcaatctagaggcacctgcgtagtgtgtatgtgggtttagagtttgaggagagaactggttggcaggatgttataataacctgaataggccgggcgcggtggctcaggcctgtaatcccagcacttcgggaggccgagggggatggatcatctgaggtcgggagttcgagaccaacctgaccaacatggagaaaccccgtctctaatttaaaaacaaaacaaaaaaaaaaaaccgagccgggcgtggtggcgcatgcctgtaatcccagctactcgggaggctgaggcaggagaatcgcttcaacgcagaaggcagaggttgtggtgagccgagatcgcgcccttgtgcttggacaacaagagcgaaacttcgtctcaaaaataaaaaataaaaaataacctgaataaccatcgtctgtctgctccctaacactcacaggattagaatttctggggatagtacttaagctaccaaagaggatgccatcactcagagatatagaggtgatcagaaaactgcaaaagagaccttcttgtctttttctctaccaactgttatgatttgtcattgccactagcatgtatttggcaaaacttgctatggccttgtttgtcttccttctataaaatgaatttgttctaaaatttggaaatagaaattactgtttttgttctttcagtatattccagtgggttgctgcagagtaatatttttatgttttcaatgcttttagtttacacttaaatgtttgtgttggaaatgtcttttctgctaattcagttattggaaaagggctgtaattgagtagggtagtaaatactaattgcttgtttctttaactgaataacattttcctattgttaacggattgactacaggtgtgctgtttgactttctattacttgtaactgaagttagcctctcttcctctacccccgcaaaagtgtaggagactgggtgatggtcttgtattctctacaagttggtggcgttgtttaggccccaagctggaatgctgatgaccctatgattctctccctccaccctttacatctgttttatcatgcaagttctgatgatttttagactatttttctaggctctgcttcacacctcattgacacctatcttccctaattaaggtcttttttttctggcatgtatgttgccctattaacagtagctttccagagggtacatggctcacacctgtaaacttagcactctgggaggccaaagcaggaggattgcttgagcccaggagtttgagacaagcctgggcaacacagggagactcttatctctacaaaaatttaaaaaaataaaataactgggcgtggtggcacacatcttatagtcccagctacttgggagactgagacaggaggatcccttgaacccaggaggttgagggtacaataagccatgatctaaccactgcactccagcctgggtgacagagtgacactgtctcaaaaaaaaaaaaaaaaaaaggaaaaatagctttccaactgatcacagtatctgcagtcttcattccctgataataaatctccaccttgctgccataggcatctctcctctttgctatttcgattatatcactgcttctgaaaactctgtaaggtgcctatagcaatggttctaatatttgggagggagaaggggattcaaatctctctctctctttttttttttttttaaggagatagggtttctctatgttgactgggctggtcttgaactcctggctaccagccatcctgtcgccttccaaagtgctgagattacatggcgctcttgtcaaaatggatggacatttacctctgaaatgtgcccaagtgcatatttgcattccgtagggctttttagaaaatcacattgaagttcttttacaaatcttaacttttgaggatgctatagaccatcttatgtttttttaaaatgctgggtttttgttttgttgttttttttttttttaaatgccgtcgcatttacttgaagtgctcatccacccatcccactcttggatcctttaaagctctgctcaggtcttgtttcttcgaaaaagcatccccacactttaaaaacaaaaaactggattagatacacatgctttctgctcttataacaccttaagagtcttacccactaacagtaacttcaaattagcaactgaatcattttgcttcctagtgtagaccctggccaaagtaggtattcatttaatgtttattaaataaatatgtaaagttaggacttttcaagcattttcctttgagtaaaatatttactattttgtagcctatgttctggaaatattgaacatctagataataggttataaggattttaactaactggacacttacctatattttctaaattttggaagacttgatattgaggtctcatccagactaaagttttactaaatggcatctttacaaataaaaaaattcaagatttcatatttagctctgaatgtctgtttctttaaaatctccttgtttagccagtttagactaatgtctgagctaattgtgttttcctttttgggagagaggttagaaaaggtcactacatttgaaaagaccagttgtggaaatagtaattttttttaacttatcagtgatatctgatgttatcagtatactaaaagtggacatagaacgttaaagaaggaaccaaagaggcaaagatacctggagttattagggacctattttgagattttgtctctggcactaagaatttattaatttattgagtttagcaaatgatattggcagtttattttagtgctttgtgcttatttagctctttaacccaaatcctctaataatgatctccttagagagtacacatactcttggaaatgattcattttttttgaaggtcatatttatttatgtggtttcttttttttttttttttgaagggcatatttaatagctgctgcaaacatatggaatagtgctttaatcagtggtgaacaagaaattgctgttgttggttataaaaacaagggacattaatgttcttgttcttgtaccatagtaatgagaaaaaaaaatagtggttgaatggtgtttaatttgtacagtttgtgtcaaagtagaatgggcagatattttggtggataggcttttgtcttagttataaaaattaggacatttggtatgataaaggcagagaatcttaacaattggcactggcccagaaaattcagggtgcagtgaccatagcgtgttatgactgctacagtaggcatagccacctcctgaagtgttttcaactgcttgatatacggactttaggcagttcttgacttgtacatgctaattcactgcttccacaaacagttcatagatatatgctgccagatatttagtgttgaaaacttttgcttcttccaaatattcatacaatattcatgcttttactataatatatagtagattgaacactgaaccaaatgagcttgggttcaggtacagcttgtgtaacaaagcttttagtgttgggcctgtatcaaagcaagattcttcccccttatttgtaatttctatagagagcataggcaaattaataaaatttactcagtctcaaaagggaaaccaagtaaacagaatgatgcttttgtggaaagttacactgtccaagtaattgttacaggtgtttttagtatcattctttacattttcacacaagtcctaaattgttcattcctctttgctacatgatacgaaatttcacaacatactggttttttttttcttttaaccaaatatttgcagtaatccaatacaacatactggtttaatacaagagcttaggttaaataagtctcattattaccttatttcctttctccagttccccaaaaacaaaaataagggtattactcatgaatggacttgttttgattcctctatccgtgacttaacagtttttgcagaattggatcttttggtaggaggagaaaatagctaatttagagcatggaacattattatatggtgggggggggcatgggtgggagttttttggtataagggctttatgcacttggcacaagaagggtatgggaaggttgccaaggatcagtcaaaaatgaggaaatttctctactttgtgtgcttcattctgtagtgatcatatactccagattcgtagagtttttcatactattccattttcacagtgaaacagttgaagtgtgtcctggaatctttttttttttttttttttttttgagacaggtctcagtctgttgcccagactggagtgcagtggcatgatcttggctcaccacaacctctgcctcagcctcccaagtagctgacattacaggcgtgccccactactgcccagctaatgtttgtatttttagtagagacggggtttcaccacattggccaggctggtcttgaactcctgacctcaaatgatctacccacctcagcctttcagtgctgggattacaggcgtgagccaccatgcctggccatgtcctggaatattatttgggttctttcagttgacttctcatacctgggagcagcactataatttttagatggactgggttagtttcagagaattgagatgacagcgtctgtggcctcctgtgacatgcacccaagtaaagctaaaatttttatgatttagccatgcacatgattgcattaagtcatgtttcgtgattgtttagggatccaccatttaggatattgtttgtgagactacttttgcagtctcgtcatctctacaccactaactctcttctaagcatgtcagtactttgagcctgtttacactctagtgtttatttctccatgtttttctccatgctcgtaaaatcatagatccatacatatgtgtatatattttattattttatagaaatggtctatgtttaacttaatattttgtgccaaagaattgacacttgaataaggtcagtattttcagttatcttttctactagaaatggtctaagcaatttttctcttgggaaagagatgattacttcatttgtttagcaaagtgtggcaggcactaatcaaagtgctggagggatattcagctctgccttgagggagcttacccacctagtcactgtatgaggaaagtcataaagttttaactaacatttgtaatactgacttatcgtttaaggaaaaggctcagggatagtgactttccaaggacacgcagttaatggctgatacagacagcattctgaattctggatcatacttttattcttacgattatatcacataattttaattgtgacgccaagtagaactataatgaatacctgtatgataagaagcaaaatttataaacatttagaattttgaattcaggaattttaatttaccttacagtttatagtacttatgaccctaaagagataaagcgttttgaaagttgataggaaattatataactagatattcctatagttgaagcaaattttccccttagggtcttacctttatctctagttagatttaattaacttcattgacctaaactgtttgattttaatgtttgccaagacttaaaatttacctttttattaatggtagatagggtgatatgcctagcataaaatataacttggatattttaagttcaatcgggggagactgttgcttttctatagagataaagcaaacatttaattcctataagagaaagtttcttttcttaagaaaataattgctctttttaattttaattttaagaaattctcaattcatgttcttagcttatatttgaaacatataacatgatgaatgttatttttaaaatgaaaccctgctgatcttcagtcagatgtgtttgatttttttcttttttaataatagcagtgggttgcaccaccactgttcactccatttcttgattactcacaaattaatatatttgattatcgctttttaaaaacttgataattgttttccttggtttgggagtttttaaaaaagtcaataaagtttaatattaatgttttttatccaattacaggagtcagaaataccatcagaggaggggtactgtgactttaatagtaggccaaatgagaactcttattgctatcaacttctgcgacaactaaatgaacagagaaagaaaggtattctttgtgatgtcagcattgtggtaagcggaaaaatcttcaaagctcataagaacatcctggttgcaggcagccgtttctttaagactttatattgcttttcaaacaaagaaagccctaaccaaaacaatactacccacttagatattgctgcagttcaaggtttttcagtcatcttggacttcttgtattctggtaacctggtgctcacaagccaaaatgccattgaagttatgaccgtggccagctatcttcaaatgagtgaagttgttcaaacttgccgaaatttcattaaagatgccttaaatataagcattaaatcagaagctccagagtctgtagttgtggactataataatagaaaaccagttaatagagatggtctgtcttcatcacgggatcaaaaaattgccagtttttgggcaacacggaatcttaccaatttggcaagtaatgtaaagattgaaaatgatggttgtaatgtcgacgagggccaaatagaaaactaccaaatgaatgacagtagttgggtccaggatggatctcctgaaatggctgaaaatgaatctgaaggtcaaacaaaagtgtttatttggaataatatgggctcccagggaattcaagagactggcaaaacaaggaggaaaaaccaaactacaaaaagatttatttataatattccacctaataatgaaacgaatttagaagattgctcagtaatgcagccacctgttgcctatccagaagaaaatacactactcatcaaggaagaaccaggtaaatattatctatacaaggatacttccttgttcatcctaattctagttggatataatcttgaagtatatttttaattgaattattttagttataaagtaatactaaagttgtttacaaaagaagggggaacgtcattcaaatgcataacatatttggtatattttctttgtcttttttcaacacatatatatgtgggtttatcaaaagatgtattaatagccaggtattgcatatattgtcaaggaacgtggactctgctgcatgtacgggtctttgactttcctcatttttagcctctgtgctcactattttatacccagtgttgggaaagatagaatctttagttgtaatatataatcactgtcgtttcagagacccccttaaccttttttattttatttttggctgttaaaacatatttaagtgtttcaaagaattttgccaattatgagattatggtattctagtttgtttagggctactgttcttctgttattttttgtttatttatttttttgagtcggagtctcactctatagcccaggctggagtctcactgcaaactccgcctcccaggttcaaacgattctcctgcctcagcctcctgagtagctgggactgcaggtgcgtgccaccacacccagctaattttgtatttttagtagagatggggtttcaccatgttgtccaggctggtatggaacccctgacctcaggtgatctgcttgcctcggcctcccaaagtgctgggattacagacatgagccaccacacctggcctagagcaggtactgttctgttctcaccatagaagctattttgtttgtccactgtcacctgattttcattcacctttgcattcattgcaaagcctctgaggcctttctcttcaatatatttctctccaaaagttccgtaggaatcttagagaatcacatttacagtgggaatttttttaaaacgagaagaccattgttaagtctttagtttaatctggctgtgcatatctttatttgaagaagctcagtgggtttgaggtttcctatgcatgcctgaggcttgtccaccactgtcatacattatttaatgcttgtttttttcacttcaaagcactgtaactgttcagtgtctgatttatacgatggtggtcatctgaggatggagtattttctgttaaaggaatcactgtttttagttgccagagggcaaaatgccatagtaatcctgtgaaatgttcctctggctttttagatttgggttagctttcagtgataggaattttgtgtatgtatgtgtgtgtgtgtgtgtgaaatttttactgtgtgaaaaatcaagtgtgtatatataacgaatactatatatctttttccttgtactttatatcaagttttaacaataaaatccctgagacaatttagttaaatgaagtattaagggtagatagactccttagctagcactttgttttgtcttaatgtagaagaccttgacagatttctcattagagctacgttgtctttgtgctgtatggattatttctgtttaacagtatggtgggaaccctgtagtgtttttaaatacacacacttttccttaaaggaataaataacatcttttgggtgtagcggttgtttgatggtaactagtcagcagtaacctcatttaaaaaattaatgccacatataattggagtgatttaaagaaaagcattaataatgaaccacaatgcatactttcaaagatgacattactagcaatttttatcaagtatctcctagccatggttgtgttaatggactagttctattataaattaattggtggtctaatatgctttatctcttacatctgttttgtttgtttgtttttaaacggagtctcactctgttgcccaggctggagtgcagtggcacagtcttggttcactgcaaccactgcctcctgggttcaagcgattctcctacctcagcctcccaagtagctgggattacaggcacatgccaccacacctggctaatttttttattattactagagacgggggtctcaccatgttggccaagctggtctcgaactcgtgacctcaagtccacccaccttggcctcccaacatgttgggattacatgggtgagccaccgtgcccagccgtctcttaaaaaggattattttcatttcattgataccagtttggtatccgaaccttgcttaactcacaaatttggttctatccatgccaccagtgttatttggtggaaaaaataaatgggtctcaaaagagcattatggttagggtatataatatgatatagaaccaaggactggtaaatttttactgtaaagggctaaaacagtaaaaaaaaaaaagactttcacctttgttggtcataaaagtcagctcatcaactctgccacttgtgacatgaaagcagtcatttgtactatgtaaacaaatgaaggtaggtgtgttccagtaaaacttgccaacccttcgtatatagcagtggttcttaatcatgggtatgcacgttggtatcacttgggagcattacatgccgtaaagggtctctcttctgtggattccaatttaattggtatggaatgtggtttggatgtggaattttttttaaagttctacaggtaattttatgagttaaggctgagatcagcaaatattactatattggaaagagcctaaattgagtcaaacataatgaatttaaaatttaaaaataagctgtgccacctaccccctgtagtccatgatcaaattaagctcttgtcctcagtttcctcattaaaatattgtgttgattttatagaattattatgaaaatgaagtgacaaatatgaaataactcttggtcatggcaatcctccttaaacttggaaaagactattgaggttattcatatcagttttccggtgctgtgtactttctaccaaatgccagatagatggtcttagcctcagcttgattttttgactgcttgtaaagacttccctaagcagcttccagtgtaggatgactgattattaggtagtcattttaaatgtagccaaaatttgcttctctataacttcctaattctgtcgttgggaatagtgtaatttattatttatttatttatttatttatttatgttttttgagagacagagtctccctgtgtcaccaaggctggagtgcagttgcatgattttggctcactgaaacctccgcctcccagattcaagcgttctcctgcctcagcttcccaggtagctgggactactggcgtgcaccactgcacccagctaatttttgtattttgtatttttagtagagggtttcactatatgttggccaggctggtctcaaaaactcctgaccacaagtgatctgcccactttggcctcccaaagtgctgggaatacaggcgtgagccactgcgctctgcctggaatagtataatttaaacctaacctaattcctctaatctacctgataacccttcaaatgttagacgtttaaagagtcctgtttttgtaggctatgtgctcttctgcccatcttgtgatgaatacacacaatttactctttccaggcaagttctgaccaatatagaacatagcctgtgtttaccaacgttaaggccttcccaaggtcattcagctagtaagagtagaaagaggcaggttgcatatttaggactatgctgcatgaaaaccttgaaattaactactaaagtagtagattcctatcttttttaaaaaattagttccttttaactttaaaatatttttatgatccccttcatcattagttatgctttaatttccatttattgagaaaacagttgtccatgaaataaatgcttttaaataaatttgaagttctatagcaaacatctgaaaagtcttagtgaattgttcaatctgcaaacaatgcttggcatgtttggatttggcgggggtctcttctagttactgtgtcttccctcaggtcttcagcacagagtttgtaagatacagttctaataacgctgtcttgtataatgttgaagcttttgtttgggtgccttttaaagattgagataagaaggtgtacccatagctgcagggtttttattcagatggtatttttttatcttgaaattaacatatttgttgtttgactcactacagagtcatatttgttgtttgacttcacttcagatcatttcttttacacaagaatactttgaaggtagaactcagaaaagttagaaatttctgtcctaagagaatatgcacatactgggattatggaataattaaaactgtcagcaaaaactaaaatctgggtaatcaaataagggtaaaaatgatgtcgtgagtgaattgctctgataatgtaaaaatttcaaaatccttgtcttgctgatttgcaaccaggaaacattaaattttagccaaataaagtagataacctgagattagaaattgaattacagaagtacagataactagtgcctaaatttgttttacaacgtgtattcacacatgttgtgtcccgtttaactagaacaagtcaggtgttaatctgattttttaaaatcactttattttgcgggctcatggaacatggttttctgagcctagatttttaaatttatacctgtcatactagcaacttctacctattataaataattttactctgtatgtacgttgcatgcatacataccttattttgaaatgacaaaagaaacaaattagcaaaataaagtaaaattggcaaagaagttaagagtgctcatcatggatataaatgtggttgccctaattaagcttttaattggctctaagatacaaaacagccttactcaaaagagaaaaacataccagttctaccaggatgacaaacttcctggtactgacttctgaaaggaatttctccagtgggatttttttatgtagttgacaccaagtaatataatggacagtttccttagatgttttctagtaaatgcagcagtcgattattatatttttaatctttgccacaagctgatgtagttctatgtaaatgattttttttccttatgccatacgaatactcaaatgtaaggtaattttagttgattaaaagataaagtttagaattcttttaaataacctggaagtttctttcacctagacttatgatggaaaaatagttttgcagcatttttaggtttgcgttaatccttacaagtagagttgaaatcaggtttaagctttgcacttatttgtgtaattgcttttttggtaaaaaagcatacaatttggtactttgaaaactattttgagaaaagaatatccaaactagatagatataagaaatcgtaataaggcatatatttgaggcagagtcttgctctgtcacccaggcggagtgcagtgtcatgatcatggcttacagaaacctcaacctcctgggctcatgtgattctcccgcctcactctcccgcaatcagccacacagagtacttggaactacaggtgggcgtgcaccactatgcctggctaattttttttttttttttttttttttaagtaaaggtgaagtctcgctttgttgccaaggagactggtctcaggctcaagggatcctccagcctcacttcccaaagtgctgggattacagccttgagccactgtgtccagtctaaaatatgtttcaaaaccatgggacatggctttggtgaaggagacttgggctttagattcagttttgccacaatgctagccttgagtgtatcccagacagcctccctaatgggaaagaagtaaaatttctaccttaaaattctgaaatcttaatagttctgaggacccaaagctttttcttaatcattttggcaacaaatcagctatttatatttttttacttccttaaatgtgaatattcatgggttttttttctttttttcttttttctttttttgagatagagtttcactcttgttgcccaggctggagtgcagtggcgtgatcttggctcactgcaacctcacctccagggctcaagcaattctcctgcctcagcctcccgagtagctgggattacaggcatgtgccaccatgtctggccaattttgtatttttagtagagacgagacgggtttttttcatgttggtgaggctggtcttgaactcctgacctcaggtgatccaccccccccccaacccccgcctcagcctcccaaagcgctgggattgcaggcgtgagccagcacgccctgcaaatattcatgttttattgtataaatattagtgttttgtataaatattcatgttttcattatagggtgctactccagaccccacatggggtgttacagtcatagctataaaatctgaaaaattctgcattctaaatcttaccccaagggtctcacgtaacagatttatggatctgaattagtttttattctcttaggagattccgagtgttttgctaaacctcttaggcatcctatggagtatgctatgaaggatgagatgcaagtcagaatttaatttcatttttcattagcaacttgggggggttctaataattagggggagggtgctgaaggccagatgcttacttatgtatttatttattttattttattaagagacaagatctccctctgaggccgggtgcagtggctcgcgcctgtaatcccagcactttgggaggccgaggcaggtggatcacgagggcaagagatcgagatcatcctggccaacatggtgaaaccccatctctactaaaaatacaaaaattagctgggtgtggtggcgcgcgcctgtaatcccagctactcgggaggctgaggcaggagaatcactttaacccgggaggcagaggttgcagtgagccaagaccatgccactgcactccagctgggtgacagagcgagactcagtctcaaaagaagaaaagaaaaaaaaaacagctgggcacggtggctcacgcctgtaatcccagcactttgggaggccgaggcgggtggttcacaaggtcaggagatcgagaccatcctggctaacacagtgaaaccccgtctctactaaaaatacaaaaaaaaattagccaggcatggtggcgggcacatgtagtcccagctacttggggggctgaggcaggagaatggcttgaacccgggagcagaggttgcagtgagctgagatcgcgccactgcactccagcctggggcacagagccagactccatctcaaaaaaaaaatctccctctgtcacccaggctggagtgcagtgatcatagctcactgcagcctcaaatccctgggctcaagtgatcctcctgcctcagcctcctgagtacctgggcacacctacaggcatgggccaccactcttggctaattttttttagatttttaaaatagagacagggtctcgttatgttgcccacactggtgtccagctcttgggctcaactctcctcctgcctcagcctcccagagtgctggggttgcaggcatgagccactgtacccagccctgatgcttatttttaaaaataaataatagttaatgagttatatgatatactaatgcataagaatcttcagtatttaattttaaaagatggtagtaggcaaccatatggtaggtgaaatagtagtctgccactgtttccccttttgctgtgcttactgttgctttccttccctgtatcatacttgacccaagaagtggctacactgttgattattacctgtaagttagaaactctttaagtggtcagaataaagctgaagagctgaagaagtcttatgtgggtcagttaaggcatttttgtgacttcttcctgctgaaggtgttaagttgtctaaaccatataaatgccagtccctgaaagttttttatagaactgaatttttggtttctgatacagacttaatatatagtagggtgaccagatagtgtaaattttcattcaaagctttactcttcagaaatgttataactttctgggaactccaaaatagctttccacatataataggaaatttggaaacgtttttatttaaaatctaaagacactgagcaataggccacataatgtcaagattgaggagtcccttatgcggaacttattcacaatagggtgactgtggggtagaaacatactcagtgccatgtgataaatgttaaaattagattatttaagatgcatgacggggtgcagtggaacagtcctaactgcccagaggagttgggaaagcttcatagagaaggcagtgtgagtggatcttttgttatgtaggagtttgctaggaggggaagaagagcattcgttgacttgcaagatgggaagaaattggaataagtgggtcgaagaatagaaaaggggtagtgttgtggggacatctccaatttcctactaccttgtctataggtataactagttatttttgtattgtaataaattctgacttgttttacagactctgaagtagtgagtggtttttttaactagagatttgatctgtttatattgcatttaagactaaaaagtttaagagcatttttcatggattggaggtggggcatgtactggggggacctgttagggagaaataacagcactttggaataatgcaaggaagaaacagttgagcctagtctaagtaagatggggcagtcacttgtcaatgagtttgcgagtgaaagggaagctattttgagtttaaaaggctgctacaggaactgtaaagggtggtttatataatacatttgcaactgaatttactctccactgaaaggagaaaactgaagagaaaaaatctatacctgtttatgggggggaaaagcaccaaacacatttacttttagttctgaaactgtcaccgtaagagaaacttgtgctaatatgtgtttatatgaaaatgaaagttgagtagatctgagtctgagtttttatacaacttgtttagctgtttcttaaaacttctttcccagggtcttgtctcatatcttttcaagaatatttgtgttctgagaaaatctggattagtctgcacttgcctaatggttggaatattgagaaccacaagcaaatagtcagggaaacctttccaactcagtcttgtttaatttagcattcacaggcaggtgctgtactactcacttcgcacgtgatttggaagggttgctagcccaccgtgatctaaaattcctgtcatgaccaaggcaccaagattagtcttgtctttaatgataccttgttttgtcttgtactttgctcaatattttcatttactaatatcattggtcatgggcacatttttgggaggtagagactgagatttagaccagtcttttaatcccatctcattctttttccactgttaccagattttcaaaaatctatggtaatattttcatttttttttaggagatagggtcttggtctttcacccatggagggagtgcagtggcatgatcatagcttgctgcagccttgaacttgtgggctcaagcgatcctcctaccttggcttcctcccaaagtgctgggattacagacatgagccattgtacccgtccttccatgaatagtacctctcatgaagatattatttaaaatgcaatacatggttaattagagaagtatataaatgtgaattctaaggaggagattgctttaaagtagacaaaaagtattactgtaaagagcaatgatagctagtaccttggtatccttaagattttggagaatatattgttaaataaagggaaggtaataaagtggatgctggtttaacacagagtggaattaatgtttatttttgttcatttcacaaaaagagcatatcaagtatcagtagcaaagtacgtgtgaatatacttctgcactcgtgttcccagcattgcaaattgtagttttttgattgcctgcttatgtgccaggccctgaggcttggtgcttgtgataaactgtcaggaagcaatgtaatacagttactaaatagtgcagacctctgccactagcttgttatttaacctccctcagccttagtttactcattgataaaaagttgaaagattttactgccggatgcatacaatccatttttgttataggggttgctactatctgttcactgagaaaagacatttttttaaaataggagaaatcctacatggcttgtcatttagctctggtcatttgaatattacataccactcatgtacctgccaccagtcagaaaaatagccgtcattttgtgaaaccagtgtgtgtgtgtgtgtgtgtgtgtgtgtgtgtgtgtgtgttttagacaagtgcagtagtgagaagaggggaaaggaaactaatgtttgaattagtcttcagaaaggatttctgctgtttgcaaagaaatcttagccctttttttgctacctttaaatgaagcataagattcccataggaagatgctggatatcacaaaagcaggtgtattagagtttattttgtaatcttgtaattttagagaaaaagatgatgaccaagagttgctatcatgcttcctaatgaagcaaaattcattcgtgtcaattaagtggttggttgtttggtttctattccattcacatcaacatctctaataatgagttgctaggtggtttggctggttttgaataaggtaagcagtgacgtaatatattggttcctgaaagttaagcacactattgtcaaaagattgtcaacttggaagaactcacctgtttttgagatttgtttttgatatcaagaaccacgtagttggtgcctttcaaaagagacacaagacaaatatacttgatatttattttgtaaggttttggctgaggaggtctatacttgttgtccatgtagaattagaaatcacaaattctaatataatactttagggctagggtaggagataggaaatgcctcttaagagttgaggaaagccttcaacaattcactgtagaattttgcataaatagaaacctgtatttggaaacccacttggcagaattgtaagacatgtccttgaacagactgcatttcagaataatgacttttttaaaaaaagattgagaaatctagtgaaattgaataattgtattttttatttttatttcaattttgttgagacagggtctcactcttgcccaggctgtagtatagtggtgtgattgtagctcactggagccttggactcctgggctcaagccattctcccgcctcagcctcctcagtggctaggactagcacatgcctggccaattttattttttgattattgaaatacatttaactttaagaaaacaaaaccactaaatttcaattaaatattttcagttcatgataggttttagtttaattgtagaccaaaaaaccaaattattcttcagataccatgaattaaaactaaactttgtttagtgatataagttgcaaagggcaagactattcaagccagcatttaactctaatacatatatatcccaaagtgctgggattacaggcttgaagccccaccatgcatggcaaacgatatttttaaaagccttttatttatcatgcattatgataaatactaggaaaatacctaaatagtatcctatctagctattatcctagatacctgaacagtatccccgttcttaaggattgggcaaaggagttctgtatctatttactgttatttaatgtggtaccacattaaataacatttaccacatttaatgtggtaccacattaaatacttgttcattgttctgacttccaacccatttactctaagcaataatgctacattctactaatttcaccttacagagaaaagagaagccaacagcctggtggaatatccttaagttctggctttagctctctctatgtacactgcttgtctctgctgtctctcttaagtacccagacccgtgctcctgtatcacaagactccttaggaatcttacacaatggataattccttctcttcgcagcaatatctttagtattctccctttagtgactccttcctgtcagtattcacatatgtaattttcggccgggtgctgtggttcatgcctgtaatcccagcactttgggaggccaaggcaggaggattgcttgagcccaggcattcaaggccagcctgggcaacatagtgagaccctgtctctacaaaaaattacaaaaattatccaggtgtggtggtgtgcacctgtagtcccagctatctgagaggctgaagtaggagaatcggttgaacctgggaggcagaggttgcagtgagctgagatcgtgccactgcactccagcctgggtgacagagggagaccctgtctccaaaaaaaagtaactttcagtttcttaaaaaagaaaaaaatcagtcgttaccctatttctcacacttcccttttatagctaaatttctcaaaaagattgtcagtattttttcttaattgatcatcatctcttcagaacacagaccactcttattttttctgcttgccccacctactcaccagtatcgctcagtaagattaccagtgacatcctaggtgcttattgaatgaaagtgatgtccatttttagccctcatcttgaattctagggagcattggcaaagtggactacttttcccctaaaagtcttttatatattttttgtaactcattaaatgttaggattattcagtatacttaatcttttctcactgtctcatctgtttcactcccatggttttatttgccatctatattctgtattctgacaaaaactgttttttcttttgagttggggtctcactctgtcaccccaggctggagtgcagtggtgtgatttcagctcactgtagcctctgcctcccggactcaggcggatcctcccacctcagcctcccaagtagctgggactacaggtgtgtgccaccacacttggttaatttttgtattttttgtagaggtgtggtttttccatgttgaccaggctgatctcaaactcctggcctcaagtgatctgcccacctcagcttcctaaagtgctgggattataggcctgagcccccacttccagctaagcagtctagctttaattggtctccacttctgaaccaatgtggatgcaccagcaatgttttatacatctagtacttactagttagtactagcagtattgtttgagcgtcaagtaccataattgtaacacttggcttgttatattatccaattagattcctagatcacatctacgatataggtggatgtaaattagggagaaactaaggcatatggtcacatagcctgtaacagaaacaggagtggcacctaatttaccctggttctacagcccattcctaaccagtacactgtactcactgtacatgtcttaggcttctgtgagccttgtagtattgaacacagtagataattcattacttacagatggtactttttatttaagaaacagttccaagaaagagtggtgttttgggtggtggctatggtgtggtttgtagataaatttttctatgtttccttttcagatttagatggtgctctactctcggggccagatggtgataggaatgtgaatgcaaatttattggctgaagctggcactagtcaagatggaggtgatgctggtaggtacagtaagattttagcaacagtacatttaagattgggaagtgttacatcttacctgcagcctagtgtaatttctcttccataagggggttctattgtatataactactttcaatctatggtagctatgtttatgatgactggaaaattggtaaatgcaaattgatgtttccggttttgtatgtttgacggagtcatttgtttagttttaaaaactcctacatataaaaagtaattgagttaatatggcttatggcttcctgctggtatatagatacggaacggaaatggtaattacgataatggttgaatttattttaattagtttttatgcaaaatgatggtgtagttaatggctatagaaaatgttgattagttctgtgtgatgtcagcagtgcattggaggaagcttgatgaatataaaaacaaagaatccatgagtatgttatgaataaaatagagtaaaagaaagtcattctttacagaagaatgccaagctgatagaagaatgatagaattggaaaaatagctattttgcaatccccacaggaaataattcaaagtcatcagtggatgttaagccaccgttaatgggcttgtccccctatgattgggtgaaagattgttggggaatatcatattcacatggtctcaaattattcccatggattcccatagatgatttccacttgcaaaggggaaaaggtaaatttacaataaggagatctgagaaagattgtcataactaagtgattaaacttagtgccattaaaaagagcacaaaccaaaattaagggctggctgatttgatgtgccacctggcatacaacatttcctatgcagtattcttgagaaactgtttagcttgtatctaatgacaaaggaaaacccagacattgatgtatacgacaggtagtccaaactctaaaatgttaatgttacgacagacaagtggggaaaccactagattgaaggagaccaaggaagtaaactaaagtgcagcatggatcttgattagatcatgggaacaaaaaatggctaaagaggacattttggggccaactggaaattagaatatgtagtgtgtgttaagtgatattcagttaattttaaatttcttatacggtggttatctaggagcatgttctagaagatgcatttaggcttgaagttatgagcatgcatgtttctaaatagtgcatagaaagcatgtatgtgtgtacataaaaacttgacaaaactagtatttgttgaagatagatatggatgtttattgattgtttcaattttattagctttggaattcttttcaaagttggtgagaacagagacagtgaggtacttgttactaagagtagtcgtgggctctgaattcagtatgtactgaccaaaataaaaccacatttctaaagaaactgccttaaggtggtttcccctgactgtttaaaagaatttacaaaacaagttttgaaattagcagtttgtacgtcagatgtcttgaattttaaagatttttttgctcgtacagaaagttgctaaccgcgcaagaagatgttactgcacttgctttctcagttttgaaatctagtccaagaatgggtttaattagggatatttgaattcatatgtaaaattttaaatttgtaaacctttgatatagggttattcctcttaaaggggacatttcgattcattagtatttttgcatctgagatcagcctttgcttgatgattttgatgtcaaaaacttacattgctttttccttagttttctattgtggaataatgtacccagaaggatattattgatcagtaagcaccattttgaagagatctataatgaccttaatgatccttaagtgtattgaattacaatgacagtacctttatttaggccactcttgtaattcctacaagtattctctgttataagaattaggagagatgaaagaaatttggggcaaggtttacttaatttgaattaccattttgtattccagatagagtattcattccttgttatcatggatgttgaatcttggattttcagtttacaaatggttttagggatattcttctgtctcctttttcttttgagatggggtctcactctgtcacccaggctggcctgaatctcatgggctcaagcgatcctcccacagcctctcaaattactgggatgacaggcacgagccactgtgcctggcctatttccttattcttacatgttgtgaataatatttaattgtagatactagaacatctaatgtgtcttttggtactagttttccaagtattttgagcaagtcagaagtatgtattggcatttgctagataacatttattctacaagtaattgtagggcatgtgtcttaaacaatagaaaaaccaaggcaagtaagataggcgcaggagtttgtactgatttagacaagaaatatggatcataaagctcaaactttgtttagagatgtgaaactaacagtaggttgacctccacaggctaccacttccgttccattctttatccctcacacagaaatgcttcactttaggattcttacaacttactcccaaacactaattaggtgcagctataatgagttatagttgaatttatgtagctatgggttcagggggctttctttacatcaaaaaccggtgacggtattccaagtacagcacagtttacagtaatagtaatgatgtgcagttttaaaatattttagagacatttttactttgttgggtattaagactttcaccaaaaaggaatcttaagttatcttaatttttaagagggacagcatgtctgagaacatatatgggaagtgattcttaggaaatccatttgggtaaacattctttacttttaaaaccgtgatgcccatgggaggaaaatgtattattgctgcttgagtgaactgtatcttggcaaggagtgttttaggcagaggaaagcttaagcactttgaattgggagcatgcttattatggacgaggaacagaacagaggtcagtatagttggaatagagtgactgaaaggaaagggtggttggaagccagggctccaccgggtaaagctttggaggatattgaaagtctctagcttttactgtgagggtgggtagtctttgcagccttgtaagctgagtggtgacctgacttaaggtagtgttttaaagaatctgtgatttctctgctgagaacagactctaggaaggcaacagtggaagtagggagacaagtttttggtggctactgaagacagtccaggggctagagctcatgattgattggatcagggtggcaatagttgtggaagattctggatatatattcctattgccaaaaggttcctggtccaaggaattacattaaagatggaattaaatccagtggatataattcctgtccttgctaatctgaagatccttaggcacatgtattattctattttgattctatcttctgcacgttattttatttaaggatggagttagaaagaaatttcagggaaccctgagagcattcagttaccttgccctaatatgtctgaaacaaggatctagtaatagaactttacatttttaattatcctatatatattctttattcttagtctatttttctgtaccaattaatcttaaaattatgtgcctgtcctggattcgtaataaggagaatatcccatttgatagctgggctttagggtgataaaatcttaagtgatagagtagttagaaaaagcaactattaggagttctggtttgaatatacccatcctttaaaagggtaatttcttgtggcgtctgcacaattaaatgatattcatgtttttttctcccgcccgccacctttttttttttttttttttttttttgagacatgatcccactgtgtcgccctggctggagtgcagtggcgcaatcttgaatcactgcaactcccgggctcaaatgatcttccccagtagctgggactgcaggcacacaccaccatgcccagctaatttttaaaatttttttgtagagatggagatggagtttctccatgttgcccaggctggttgcaaactcctgggctcaagtgatccttctgcctcagcctcgcaaagtgctgggattatatgcatgagccactgtgcctggcccatgattaatttttttaactgaatttcttctactatagttgaatggtattttgtttaattgtgataataaagtaggaagacatctcaattttagactaaaatacagttttatttaactcatactatgaaattctatcataatgcctgtaggatataaatataatttctgttttctgactctgatgagagacagatctttattaccattattaattcagaatttttacttgtactaggtacttcacatgatttcaagtatggtttgatgcctggtccttcaaatgatttcaagtatggattgataccaggtacttcaaatgatttcaagtatggattgataccaggtgcttcaaatgatttcaagtatggattattgccagaatcttggccaaaacaagaaacctgggaaaatggcaagtattagtcaactaaacaaatacagaattaattaaataattgttaacaattaaaagctttcatgttctgcattttttaaaaaccaagtagcagtagctccacataattgctgttctcagagatagagataagaagttttgatagcaagttttctgtttaatgtgtaataagcactttctctttttttaattctcataggtgaatcatctctaatcatgaacaagttaaaatgccctcattgtagctatgtagccaaatacagacgaacactaaaaaggcacttgctcattcacacaggagtgagatcatttagctgtgatatttgtggaaaactgtttactcgaagagaacatgtaaaaagacattccctggtaagtaactttaaatacagctgatctttgagataaactatatttatgtcagtgaagtttaaagggatttaaacagttaattgtgaatttaaggaagattgtctcctaaattgctttaaacagtttgactttatgaactgatagtgagctttttacagagaaactggtgtattcactcactattaaatgtgtggtttaatttgagtggttcaaatgcattctattatatataatatccttatattggattttttccccctccaattaggtgcataaaaaggataaaaaatacaaatgtatggtgtgtaagaagatcttcatgttagcagccagtgttggaataagacatggatctcgacgttatggtgtttgtgtagactgtgcagataaatcacagccaggagggcaagaaggtgtagatcagggacaggatacagaattccctcgggatgaagaatacgaggagaatgaagtaggagaagctgatgaagagctagttgatgatggagaagatcagaatgatccctctcgatgggatgaatcaggagaagtttgtatgtctctagatgattaactgacctactatactcctcaaggatgctgcatttggacctaatatgaatcgacaatttggattgttgaacttgaaggcttgcaaaatatggtacatgctggatagtagttatgttgctgtgaaaactgtagggtcaaagccttatagcaaaaaaaatttttttttatatttgcacaggactatacagcaaacaaccatgtggttggattacatggagtccccacatactcagtcagttatcaaagtaaaatattttttatttataggatatacagtaactatttgggtcctatgaaaatagtccttaaagagcttacattcatgtgctactttaacatgaatggagaaaatccgtttatggaagtacagtgacaattgacccaatcactctgtccatcaaaccactcaggctagtttgtactagtagagttttgtttctatttttatttttattaattttattttttttaatacagattttcagtgaggggctttttcaaccccattggttctattttcttgtatttttccatttaatttgcttcataacttaaaccaagtctcttctagtcttaggtattatttctcgattttgtgctgatgggcatgtttataagaactggagaggtaatttattggaatgaactaactgacttcctccattcccctcttcctttttgacatgaattttactacttcacaaatgaagaatgatgttatgaagttaccgtggcgaagttgacaaataccactaaaatgattatgatttagaagtaactttcttctgctgctctaatctgataaatggttactatatgatattttctgacatggtatttggttttgggtatctgttactttggcactattcttgtttgcctctttatttttgccagtgtactatacctcagtcctatttgaaagacctaattgaaagaaaaatcatagaaataagtaaaatgatttgttttataatttatccaccatgtccagtttggttagcttgttatgcaatataagtgaaatatcaggtttttacccgtgtcccttttatcatgaaaattaacacaaaatgtgcattctcttttgtttcatacttagcgggatattgattgttttgaaattatgatcaatacttaatttatttttttctgtccttgaagtcactacaccttgatacagtctttctagtagtcaccatgattcaacagtctcaaaaatcttacaaataaaattctgagaagctttattattctataaattcttcagggtacaaagggtgacatattgaggtgaaattgtcagatttacttagcctggtgacatgaattagctgattgtggaactctcagcagcatttcacgtattgttaacatgtatggcatttattagcatattgtatattatataagattgagggatgtcatattttcagctttcttttaaataaaaattgagtatattttcctattttatatcaggtaactaaattatgctagttatgtggaaaaaattgcaaagatgctttgacagatataatccctttggtgctccatctgatcaaagttgaaaagttgatgttttttaagagacaagctttatcattgtctctgatttcagtagaataatggtttattgttagacaatgatgtttctgcttggataaatcaaagataaattacagttacatggttagatgcatcttttgtcatctatattgtagtttctacataactgtaaacctgacagataagaatagtttcggtttgatttttgtttaaaacagatgagtacttcttaatgttctagacaaatgagtaaaatgtatttctggtagaaattagttgggcaaagatactatgaatgaaaaagtattttaaacgtaaaatgttctttgtgaatatgtaagtatagtataaagatttctttcatcccatttatccccttcctttaaataaactagtttacaattggtagatctgtctatatataaatatatattaaagaacaaagatatatatctaaaaatcacctaaatctgctttattagactacagttcacttattgcatagaaactggacttggctttacattcttaatgtacttttacttttcctcaagatatgaacttactctcttgaagctgaattttcttttactacttaaatcatttatgtatatctggtaaattatgaccaaatttttgttagattgcatacagtaaattgaaatacacacttggtacactacgggattgttgtgcttttgtttggttttagttggaaataaggtttgatgtagatggcttgttactgttaatttaaaatattctataattgtccattactttatgttgtgttgtgacagatttggctatatttttagtcaattgaaatatgatactttaaaagtttgtttttaggtaatccaaaggaaaagtgtttatactcttgaatatattagcctcagcctatataaaaatttctttgaagtaaacattttaccggaaacagaattgacagatttttctacttgctgactgcctaacttattttgtttcatgatctcgagggactgccttttcccatctagatcttttaaaaaaatagttttagtactaaggtatactactggacatttctatttttttaagtgtattctttttctgacttacagtaaaatttcaggaagttgatagatactaagaacttatgattggtctcagaggtaacaatgaaatactcataattttgtctgtggaactctggcagaattatgttacacatttggcgaagttgtctcttgtaatttatattttaaatgaaaaagtattttagagcttttaatgaaggggaagagtataaactttctttcatattcactctgtagttacagaccgtctcataaatcaagattgtgcattattagagttctcagagacagatacttccatatggacccctgttcatttttcttatttactagatattttgctaaatttagcacactagcaattaagagtttaaaaaagaagaaacgttataggaaagggaaactgaacagtaatgagtagctttgaaattggggaaaacacactagctgggttaggtacagctatcctaatggagaagagtgagctaaatgcgttaattcatgtaaagtgcttagaacactggtacataataggtgcataacacatcttaaagttgtttaataatagataagaaccaagaggaaaaagaaataagaaaagatgggggaaaggaaggagaaaataggaaatgaaaggattaggacttgggcatttatattaatacaaaatggtgtaaacggcctgaatatcactgtagtagtatcatacgggggaaagtgtgatggaaaataggtttaaaaatcttaatttttaaaactttagtaagctttatttatattttttaggattttctgaacatagcatgaagggtttagattcatttttctgaaaaacgattaaaaaaactaccaattttttttttgagtgcccacacttgccgttgtgctgtatacatgattttaccttaatcctctataaggtaggtgctaattgtctccattttatagatgaggaaaggctcagagaaattcagaaacttggctaatttaacacagctgtgacagagctcgaatttgaccacgtctgattctgaagcccatactctttcagggaggctctattgctgcctcattaaacaactcttgtagaatttcagctcttaatggagtctatggattatatttttcctataagacagctgtgtttagaattttgagtgtctttcctccccccaataaatttccttactactctttcttcataaagcagttgttttgtcactttgactatattaagacacatcagtgtagcacatgctcttaactggctgtggcattttaattttataaaagaatggtttttatctgaagaactagatagaaaccccagtttttgtgccgttcagtcacccagatccttaaacttaactatggtacataatatccacacttagaactaacaggtgtttagtcactttaggacttaaaatggaaagtttttttttttttcctgctgtatctctgctttcaactgaagttaaagaattctagatagtttaaaatgtgttagggataagcacacttcaaaagatgttttctagccctaaattttatgacattgggtacttaaatttggagtacactagctattgagaacaatattttgggttgaggagagatggttgaggccattatttagtgggagcattggcattttgaacactgtaaacaaaagaacacttccgcctgctgtttgtaaaagctctttgggaagatcttttacgaagaccaactttttaaaatgtaaattacctacctaatataagtgtcctaagacatgtatgtaaacttccggaactgttttgtctgtgtatttagaaaatacacaagaatctttattcaaacctaaaaatataaacttgtgagcactaaactgcttctggctttgtgaattttattgactgacatttaattcagatttctttgcaagtgtactaatttagactaattggggtaaggggaacaccttaatgaactttgacttatgtataattcagatatctttgtacttaaggcttacaagtttgaattatggaatactataagggttttttgtttatttgtatgtttttatatgaaagtacataaatgacagactacctccaagtaatcctgctttaattaatagcagtgatttgtaatcagtgtatcttttaagattctctacaggttttagaaaatattaaaaattccctgtaatttacatttgtgcataatcttggaaatgggttgaaaagcaaaggtaaactgcttcatcccatgttgtatatttgtggactgattgactacaagtgatgtgatgttataaatttgaagtctttgaaactttattaatgtagagaaaacataactagctttttaggttatttcaaagttagtaatagagcaaaggaaatcagaactggccagatattcagacttgacttagaaaaacaggagtttgttgattttgtttggagaagggcacaataaaggggagcccacatagcattataatgcctagtatctttaaacatgtaaagagctatcatgaggcagaagaattaagaaactttatatgtttctaaggggtcatgattgggaccattggctcaagattgaaaatcggtttttaattatccaaagatgaaatggggctgcttcagaaaaaggtctaccactggagataacgctatgaaaagtgaaagagattacttaatcattttgacaaaggcagtattgaccagacatttctatttcagagttggatttgtgcttagttttttttaggtgttgggacccttgtagttgctttttattttgcttagtcaacaaacactaaaatgataaaatttggtatgtataagtactggacgaaggatgttttgacactaaaaaggacataatttaggaaattaagaatttagacaccaagtttggcttaatagaaaaagtcactatctgaacttctttctttttcaccacaaatcaccgcagaccagtgtttgggagcaggtgtaggaaattgaattattggatctatgtttaggtaagaaaactaaaggtacttcagaatttaggctatgacataactgtctttctgaagtttaaagaaagaaagtgaactatagaaatctattcagctaattaaagtgaatgaaaaatattacagattccataactgcatggcgccttacctgctattaatactgccgccttactgtcagccagatgattttttcccaccacggccagtcttaaatttggcaataagaaaaagctaatcttccaagtgtaagtaggtatgtgttagaatcttggtgaaagataaacacaagacagtcttcttggcgcaggtcctaacagttggtgagataatacataagatggtttcaggattattgtagaattatttaggttgaaagagactgtaagagactaatgaagcatacccagagaggttgctacagtgactccagtcagttttaggacccaggactcctgaacttcaatttcagtattatttttctgtaccaaactcattcaataaatacttgagattagggataagtttgaagttagaagattccagagtacactcaaatagtatttggcacatagcttgttgatcaaaagtatttactaagtgagtgacaaaaggcactagcaactttaaggattttgcctattagtatcatatggcatgtagctatcaagccagtttcgtttagttattttgtgttgccaagcatatgatacgtggtgtcacactgagcctttgggatcctttccctggatacataaccctagtagataatgttactgcaagatgtaatgaccaaatccaacctactgcaaatgttactatggaaatctcaatgcaaaagtagcctttgtgattttttttttaaaccgtctccataacagaacacttagaattattagccatttgctgcaaagtatttgttttaaaatgtctggcatatacaccactaacatttaaatgcccaacattcggtctatacgtgaaaaaactagaagaaaagccctgttggagttttgatgtagagtgcaataatacatcaataaaggtattttaaaatgacctaatgttttagttgccaacatgatttttgtatttgtaaagaggtatgttgggttttggcatttatattttaccgtatgaaagacatattcatgtaaaaggtaatgtgaagcttagcatctcttgtcaacctgtcccctgtttccaagtagtctccttggatatttgtagcatctggattcctaataatccagataattaggattatggcatttatgtacagacatgggtaattctccaaagcagatcttcccacactaatttttcaagtacttgtcacctaaatcattaataaaatgtgccaattccaaataatagcaaatgtaggaattgaatcagcatcccagagtactagtcctgggccatatcctcattaggcaaaggaaatttgaagaagttattttaggactttacctaaggtgaagtctagaattttacatatgtaggtatgtttttgttagtcttatatttgcctaaaagttatacgttttattatttcataggcgtaaatatgtttttattaaaatcttagattagactgaaggcagtgttttggagccaggaatcattctaaacttttatcctgtatttgccttttaaaggtagctgactctgacaccccagtctgtggtggtctttcattgctccgggtgacttgtaccacactcaaatgtgagctcccgtttcattctgtggactcttcctctttggtcatacatgcattccacagatatacattgagtgcccacttgtgagaaaatgggtaggccctttgatgaataaggagaccatagggtatatagtgttctcaattattactatactgcaagtcaagtcagttgggatgggaaaagatgaaaaattagacaaatgggaaattttaccaaaaagaccctttgtattagccttttttttttttttttttttttttgatggagttttgctcttgttacccaggctggagtgcaatggcgcaatcttggctcaccacaacctccacctcccgggttcaagtgattctcctacctcagcctcccaaatagctgggattacaggcatacgccaccacgtctggctaattttgtatttttagtagctacagggtttctccatgttggtcaggctggtctcaaactcccgacctcaggtgatccaaccacctcagcctcccaaagtgctgggattacaggcatgagccaccacacccagacttgtatcagcagtttttaaaagcaggagtgtttgggaggggtaacaggttacaggatgaagacaaatataaaatagtgcagattaagaatgcatacaggcagcactttacattgtcccccttcaacataataagaggggaaataatactttcaccttaaaaatgcactacagccttttgggaaaaagatgttaactattaattttggcatgtgcttgacatttttgtattaactggcatagacattaaagttggtcagttaacgtctttttctaggataggaatatatttttttaagtgctgcttgtttccatcagctatattggataagtctgtagaactagaaaagctcttttctcagaagacttggtatatactcagggaaactgacacagtagagtctacctaccattttaggggtgtagatgatggagagggtttaaagacgtagaggagttttcctatccaataaagcagttcactaaaattgcaggtacttaggttaatgttcatttcactttttatggggtggtagagaaaaaaatcaccttacaggatgaaatcgtaagcttctgtaagtattctcaaggaaagtgatagcctaagtatctgtatttaattttaatgtgtttttttaatttaaaaaagcacagcatatttacatcctccaaaattaatatatcaaatgtttaataagtttaaaattccaattttctcattggttggaatatattattctggatatatttcttattgcctattgtatatgcgggtgtattttgctttttagtcaggattatttgatgtatgtaggaatcaccaaactttctgtaaggggccagacactttggtttggtgagccataaggtctccatcacaactattcaactgctgttgtggcataaaagcatccatggacaatatggaagtgaattgtaaggctgtgttgttgtgtttatttacaaaattaggcagcaagccacagtttgctgatccctgatctataggttccccttcccccgcaccttgtccctgtaatacatacattgaagaatgatgtgccttcctaacatcaacgtattattcctttccagagttacaaatcttgagtagcaaagagacttaactttaatggcatcgttttagctgcaaaggataaaaaccttaccatctcagctttcttaaacagcaagaccttaataggagtttagttacaccatatctcagtacccaaggtgtccccccaacccccaccaccaaacaccctggttcctagatgaaagaaataatatatctgattcagaaataacattcagaacttcatgagaggagactttcacttgctaataaaaataatttgctaatttagacccttttgttgccacatttatgttaaaagagccttttattttcaatcatgcttcaaccttgagcactgtaacatagactttctgtagcctttcaaatgttgagtatctgattaacatctacattcataacaaggtgtcactaaattagacttgtcagtcatcttgggcatagcttgagaatgctaagtctgtgaatcaaaacagctgacctgaaaaatactttccatcaagccctcagtaaagttcccaagactaaagactatcaaactgaataataaacctttatgtcatgacacactgattccccattggaacccctaattgaggactttcttgtagactttgtgttgcccagtctggtggaatagtaggctctcagtaagtacatgccaaatatacaaattcagtgctgagcacaactctggagtcagaaaatttctatttaaaacacaagttgacctaacttgttccaagagttttcccataatattaaggctaatattaatcagaagttagtttggttctaagggatgtagaaaaatttctattgtttttcctgtttaatgagatcctatcccatcaggagtgtcagatataatcagggaagatatataagggaactctaaggaaaacataaccacttaagattatgagggcattccatgcactgtccaacccatagcaatctagattctgtcttcgatattttagtggaactacccttcaaaaggccactagtgactaattgtcaaatacacaccccactctgcagcatttagcattattaatgactagtttccttcagataacactcctcttatttgatcctgaaagcatcgatattcccctatttctttgctgggcactctttttttttttttttttttttttttgagatagggtctcactctgtcaccaaggctggaatgcagtgatctcagctcacttgcagccttcacctcttaggctcaagtgatcctcctggctgcgtgctctttcccattgttctttccattggtgttactccattccattgatcacagtggcttaaactctggtaatttttatccctgatctctttggagtttgcaaacatggaatgataccatgcactattgcttggtgcataaaggatattcaatcacaatcctaatttgggtcacagttctttagtttctgttggatgtcctcaaggtctttagatttacattttactgtacggagtctcaccatgggctgatgttgcatagtaaaatcactttcagaaaaattacaacctcagcttttctgaagatatttaatgcatgccagccatgttaacactgtttgatgaggtggtgtctagctgatttcatcatgtctcatcaacatgtatgtgtctctgttaactaagatcaatagaatcttagagctgaaggaatgttagaaacaaatactctgtactttatccagcctctgcttgaactcatgccataaatgtgtacctcccacttactacctcatataacaggtcatattatcttgaggtcctatcagttcttccctacatttgaggcaggtggaaatctgcctctctacaacttccactggataatcatttcatcccctgaagccactcagattaagtttgagactacacataatggtttatgtaacagtggagattggaagggagagaggagtgcttgggatcttaaaatttttctatgcctaaaaaacaatactctaggttttctttctttcttttgagagaggatcttgctttgttgcccaggctgaagtgcagtggcacaattgtatttcactgtagccttgaactcttaagctcaagtgatccttctgcctcagccttctgagtagctgggactacaggcatgctccaccactcccagctaatttttttttattttttgtagcaacaaggtcacactatgttgtccaggctggtctccaactcctgacctcatgcaatcctcctgcctcggcctccccaagtgctaggattactggtgtaagccaccacacccagcctctgttttcatttctgtaagaataatgtgagaaatccacgctgtttaccctttttcagttgaatgttttacttttcaagactaagaattgaatatttgatatcaaaaattgatgcccaaaaatacattttaaagagaggcatcaagaattattttttataaactaggatgttaatttgctggcactggtataacacttatcttggagaagcaagtttaatcttaagtttgcagtttgatatcaaaatttaaatgttgcttaatcccaggcattcaagaatttcataattaattgacttaaggcagtgtaattttaacattcataaatttatgcaattcctttagaaaatgtattacagggatgatgagaggttttttctttaattgcattttagattatagtctaaaagaaatgaggaatatttcagtatttattattaaattcttgtaaaacttcaagtccctcaagcccaagtcattcgcctctttagcagcaggatagattcaaaattatagctactttgttatttttatgctgtccttcttttgaaaaacattaagagtatatgtctagtgcatttgtgtcactaagatggaagaatttgaatattctcactagctaatttacatcctaaaagttatcaatgctcattagcaatttttgaacttaaaaatatgagttaggaaattccctaataataaacacccaaatgcattttctaaggcttattgtgtgccgtttgaaagctaccaccatagatgtcattgttctcttggcataaaatctacgaatatgagagagctgagaatcctaagaccatccttcctgtctaggtgattcattttattgccatttgcagcaattgattgatatgcgtgacaaagggaagtttttac

SEQ ID NO: 1694 - DNA, 3039 bp, Homo sapiens
tttataatattccacctaataatgaaacgaatttagaagattgctcagtaatgcagccacctgttgcctatccagaagaaaatacactactcatcaaggaagaaccagatttagatggtgctctactctcggggccagatggtgataggaatgtgaatgcaaatttattggctgaagctggcactagtcaagatggaggtgatgctggtacttcaaatgatttcaagtatggattgataccaggtgcttcaaatgatttcaagtatggattattgccagaatcttggccaaaacaagaaacctgggaaaatggcaagtgaatcatctctaatcatgaacaagttaaaatgccctcattgtagctatgtagccaaatacagacgaacactaaaaaggcacttgctcattcacacaggagtgagatcatttagctgtgatatttgtggaaaactgtttactcgaagagaacatgtaaaaagacattccctggtgcataaaaaggataaaaaatacaaatgtatggtgtgtaagaagatcttcatgttagcagccagtgttggaataagacatggatctcgacgttatggtgtttgtgtagactgtgcagataaatcacagccaggagggcaagaaggtgtagatcagggacaggatacagaattccctcgggatgaagaatacgaggagaatgaagtaggagaagctgatgaagagctagttgatgatggagaagatcagaatgatccctctcgatgggatgaatcaggagaagtttgtatgtctctagatgattaactgacctactatactcctcaaggatgctgcatttggacctaatatgaatcgacaatttggattgttgaacttgaaggcttgcaaaatatggtacatgctggatagtagttatgttgctgtgaaaactgtagggtcaaagccttatagcaaaaaaaatttttttttatatttgcacaggactatacagcaaacaaccatgtggttggattacatggagtccccacatactcagtcagttatcaaagtaaaatattttttatttataggatatacagtaactatttgggtcctatgaaaatagtccttaaagagcttacattcatgtgctactttaacatgaatggagaaaatccgtttatggaagtacagtgacaattgacccaatcactctgtccatcaaaccactcaggctagtttgtactagtagagttttgtttctatttttatttttattaattttattttttttaatacagattttcagtgaggggctttttcaaccccattggttctattttcttgtatttttccatttaatttgcttcataacttaaaccaagtctcttctagtcttaggtattatttctcgattttgtgctgatgggcatgtttataagaactggagaggtaatttattggaatgaactaactgacttcctccattcccctcttcctttttgacatgaattttactacttcacaaatgaagaatgatgttatgaagttaccgtggcgaagttgacaaataccactaaaatgattatgatttagaagtaactttcttctgctgctctaatctgataaatggttactatatgatattttctgacatggtatttggttttgggtatctgttactttggcactattcttgtttgcctctttatttttgccagtgtactatacctcagtcctatttgaaagacctaattgaaagaaaaatcatagaaataagtaaaatgatttgttttataatttatccaccatgtccagtttggttagcttgttatgcaatataagtgaaatatcaggtttttacccgtgtcccttttatcatgaaaattaacacaaaatgtgcattctcttttgtttcatacttagcgggatattgattgttttgaaattatgatcaatacttaatttatttttttctgtccttgaagtcactacaccttgatacagtctttctagtagtcaccatgattcaacagtctcaaaaatcttacaaataaaattctgagaagctttattattctataaattcttcagggtacaaagggtgacatattgaggtgaaattgtcagatttacttagcctggtgacatgaattagctgattgtggaactctcagcagcatttcacgtattgttaacatgtatggcatttattagcatattgtatattatataagattgagggatgtcatattttcagctttcttttaaataaaaattgagtatattttcctattttatatcaggtaactaaattatgctagttatgtggaaaaaattgcaaagatgctttgacagatataatccctttggtgctccatctgatcaaagttgaaaagttgatgttttttaagagacaagctttatcattgtctctgatttcagtagaataatggtttattgttagacaatgatgtttctgcttggataaatcaaagataaattacagttacatggttagatgcatcttttgtcatctatattgtagtttctacataactgtaaacctgacagataagaatagtttcggtttgatttttgtttaaaacagatgagtacttcttaatgttctagacaaatgagtaaaatgtatttctggtagaaattagttgggcaaagatactatgaatgaaaaagtattttaaacgtaaaatgttctttgtgaatatgtaagtatagtataaagatttctttcatcccatttatccccttcctttaaataaactagtttacaattggtagatctgtctatatataaatatatattaaagaacaaagatatatatctaaaaatcacctaaatctgctttattagactacagttcacttattgcatagaaactggacttggctttacattcttaatgtacttttacttttcctcaagatatgaacttactctcttgaagctgaattttcttttactacttaaatcatttatgtatatctggtaaattatgaccaaatttttgttagattgcatacagtaaattgaaatacacacttggt

SEQ ID NO: 1695 - protein, 185 aa, Homo sapiens
YQVLQMISSMDYCQNLGQNKKPGKMASESSLIMNKLKCPHCSYVAKYRRTLKRHLLIHTGVRSFSCDICGKLFTRREHVKRHSLVHKKDKKYKCMVCKKIFMLAASVGIRHGSRRYGVCVDCADKSQPGGQEGVDQGQDTEFPRDEEYEENEVGEADEELVDDGEDQNDPSRWDESGEVCMSLDD

SEQ ID NO: 1696 - DNA, 102145 bp, Mus musculus
  misc_feature (1)...(102145): n = a, g ,c or t
attaaaggcatgcgccaccacgtccgaccagcaactgttttattttctgcagtgggtatgggcatgtcttcagctccaaaggcatggagcatgtttggggatgtcctgttccctagacttgtccagtcccttggtttccagtcatccccacctttgccccactcattcttcccagagtgctatcccaagacgagggttctaaggaccaacttccaaagcaggtagactccactttatctcccacctgactctgcttcctggtgaggcattgcctaagcactcctgaccccatctcacctcataaccagaacaccattattccttccatgcctgcacagaagaccctgcttggcaagaatcctgccatctccttacccactctgttcctgttaggaagggttgagagaaagccagtatgtctctatgaagacacgtgcataggaaacttacacagaatagatcccaggctgcctgggtcactatgggctgacgttaataaacaatgcatgttttctggatgaagaaatggtttactgaatgaaggaatcattttatccagtcactcactctgttcactgtagactcagatatctgacattaatcaattacttctctccagccaaagaaagggagactgtgtgctcccacaaaaaacacttggcccctctgcatttaagctacgctctccaagaccttttcctcctgtcatttcagctgcccactccttatggccacaccctgtgcctcatcagcagctgaaactgctccacctctgaaatcttgaattccagtatcccactctctcaccacaacctactgctcctcccaccctctccttgcctgactgcacctccccttatcctgcatacacagtctgcattctgtcatcttctgcttgtctcttccagctgggattgagccatgacccagtaccctcagtatgtggattccatgcatccaccgtctctgctagtcgccctgccttggttcagtaagggcctcttatttagagttctcctcctccatctcagtcatgatgaaatgggtcacactgctgggccaactggccctgctattggcacaggacctttctctggctgtccctttcctttggctacttggccattcatgcattcagcaaatacatgttgcacacttgctttgggtcagtactgaaactgtgggaacacagttattggcaacacaggccctgatcttggcactgacctcttattgggagaggcagtaaatagatgcataatcacgatcaaggggcagaattaagggatgtggtcagtggttatcatatacataagaaaaaggttgaaaagaactttaaaaaggagagaagagcttacagtttcagaaatttagtctatcatagtgcagaaggcatgggggcatgcctgggtggtagcggggggtctgtctgtggtggaggcttatttctttttacaattatttttattttattttttaatgtgcctgggtgctttgcctacattgatatcagtaaagcacatgcatgcagtgcctgagaagaccagaagagggtagtgtatcccctgggactggagtcacaaatggttgtgggccatcatatggatgctggcaaacaaacgtggtcctctgcaagggctacaagtgctcttaaccgcccagccatctctccaggccccaaggtttctttctcgttgaggaccaggaagcctaatgagctgactagcaccaggaacagatcccaatcagagcaaggacaactttcaaagcccaggctgcagtgacccacacctgccagccagtctacacacccttaaggctgcaaaactaataccacaagctagggactatggtcaaaccacaagcctatcaggggggacattttggatttgaacataacaatttctagaattcatgaccttcttgcccccatttactaaatactgggattacaggcatgagtcaccaggccccaggcttgatgtcatgacaacagagcagtcgtctcctgcaactggaggtttggggtttagtttatttattcatttgtttttttttttttttttgacttttcaagacagggtttctcagggtagctctggctgtcctggtccttgctctgtagaacacgcttggaactaagagatctgcctgcctcctgaggagtaggattgaaggcttgtaccaccaccacctggatgggtatatattttttaactggcttatgtttttatgagcacgagtctcctgcctacatgcacatatgcatattgcatgcctggtgcccaacgaggccaaaagaagggtgtggaaatcttggattggagttaaggataattagaagcctctgctgagtgctgagaacctaacctgggtcctttactagagcagcaaggactattaactactaagccatctctcttctccagacctgttttgtttgagacagggtctaaggtagaccaggctggcctttaaagtgttacacagcaggtgatgaccttgaattcctaatcttcttgcctccgtttcctacgtgctgatattatagacatcagctatcatgtcaggccaaagccctggacttgatccctagcattgcaacaaacaacagtggcttcctagaactaaaaacatttaatttaatgttattgctgttgtgtatatgtaatgtgttcatgttttatgtgtgtgaggtaggccatacatgacattgtcatgtggaagttagagggcaaatctgtggggtcagtccattttctacttttgtgagggttctagggattaaatccggtggtgatcctgacagcaatacctatacccactgagccatctcactggcccagaaattttttattttaaacaaccagatatttatgtacgttgtttggtcctactttcctgatgactactcatgtagccgacatccacatgcttttattggtcataaaaatactatcatatatttttattagattcctttatctttattgagtaccaggagttctgtttggttttgattagaagttatatttgtttcctttacaatcttggagattgagcccaagatctcatatactaggcaagtgttctaccaacaattacagccatctttattttatatttttcagttttgaggcagtatctccttaagttacctaggctggccttgaactatatatttgagagtggcttcaaacatgaaattttcttgctccagcttccagtttcctgagttgttggggttatgggggtggggtgtctgtggtcaaggctggcttttgtttttttttttaaattaaaatttaaaaaaatttattccccccacaggcccacacacccacacacacacacacacacacacacacacacacacaccttgagacaggatttctctgtgtatccctggctgttctagaactcactctgtagacgaggctggcctcaaactcagagatctgcctggctctgtctcctgagcgttgggattaaaggtatgtattaccatacccagctaatttattttaaattttttatgtttgtgtgtctgtgtagaagaaatgtgtgcccaagttgcccttagaggccagaagaggccatgggatcccctggagctggagttccagttgtgagctgccacatgtagttgttgggaacagaagagcagcagaattgtttctccagccttccctggtgacctaaattagccatggactcagaatcttctttctttagcctccccatggctgggattacatgggtataccaccatgcctggctaagggctcttcacagaccccagacactagtctgttaaatgtgtattttgtaaatatttttcccagtctaaatacattttcccaatttatcttcatttatttacatatgtgtgtatctgtgtgaatgcatatgtatctatttgtgcaggtgggcttgtcttgaggacacaggtatcaggagaaggcactggatcccttggaaccacagttacaggtctttacaggatacaaggatgaggttcattgtgccggtgctgagatagaaactctggtcctcatgggtgtgttgttagcgttcttaactgctgagccatctctcgagcctcagtcttgatatatcttcttcattttcttaaacaagtcttttaatgaccactggctatcatctctcatttcagcaacagtgatgggaaagtgctaagccatgtgtagtaggcccttgttatcatctctgcctgactaaatcatctacaaaaggagctgtgttcttgaacttctgtgtattttgtcttttgtcataacctgttcactatgattagtctggttaagttaagcattcacagtgctgtggttaccaggtctgaccaccagagttaaatggtgagcatgcaccagtgttgtgcacattacactgctaaattgccaaccgctgtttacatttattgaacgctcacccggggagcaaaacttgtctcctccaaaactcggtgtcctgggtcaggctgatgatcacctgactctgtaagggggtagaagaggagaaaaatacgcgcctaagagaatttaaagcatcttatcaggctggaaagaggattcatccatgaagagtacaaactgctgttgcagagaacctgggattgggcccaagcacccacattgggcagcttacaactgcctgtaactccagtcttacaagatccaacacctctacccttcactaacattcacatacctaaatacagacacaaccataactaaaaaataatacaatagtttaaggaatttgtatagctgagaacagctacaaggtaaagtatttctaacagatgttactgttgtttagcttatctatagtgggaaaaggggcccagagctcacccatggtgagttcagtggagaactccagctgactcccttacccttcttagttggcttctgctggatgtttataaagtgcacaaacatggtggggatcttgacaatgtgacacattgttctcccaactgggccattccagtcatctcggtgtttttaacacctgatttgatgtcttcttgtttatctgcttttctgtcggctacctgctatttattgttttttacttttgcttactttatatttaataagctcactcattcaaaccccaaagtatggctattagaggccatctccagggctgtgcagaacaggcagtgacccgctgtgcaagctttgagggaatgaattcaaacatggtcacaatgtcaggcatcaattttatcataaggacaggggtcaggattggggaaagcaaatgcagtcttgtggccagattgtagttcacagatgaaattagttagcttactcttgttctcagggaatatctgacactctttagccaaaggattcttttaaatacatattaaagcattttaagataaagaaatgggaagacagatatgtggggtcagaggatactctgttggactcagtttattcctcccacctggggatcaaacttagggttgctaggattagcagcaagcacacttaccctatgagctacttctacagccctctgtcaaaggattctacaattaaacagctcgagcctggtgtggctgcacatgcttttaatcgcagtattcagaaatctgaggcagatggatgtccgtgtccaaggccagcctggtctgagtggcagacactctgaaatcagtgatttgcggcattttactctcacaacagccagctgcagtatgaaccagaggcagggggctaactctcactatgcagcagcacatgttagagctagcagtgaagcccaagcagtctagttcagaagtctgtgttccacagcccctcatcaaagttcactgccccccgccccgcccccgcccacggggaagcctgggtgccttgttagacaagatgtcaaaagcactggagcagcactctctgagtccagctactccctcagcggctgtcggctgggcaaggtaggtcagacctttggggttgaatgcgcagagactttgctcatgttgaagcaaagcctgtgttctcttctgtgcagttgctgactatcaattgtgctgttcctgttggagagacaagtggatgtgtttgaaataaaaaccatctttgtggagctatgtggtatcaacaagggctaaagcgtatgaaacgctgaaggcctttgggtcaggataacttctcccccttctttctatttgtgtgtgctgggatcacacccacagccttgagcttgcaggcaagtactgacccactgaactaaattcctagcaaagagtgctatgttctgtatgcatctcttccctcagatttggatgttgaaatcctcaaggggatggttagaggaaggggaatggtattagaggaaggggtctggggagtggggtggttgccagtcagctttctgaagctgtgactaaacacctaagaaagcaacttgaaaagaggacaggtttacactggttctcattctcagaggtgtgggtcccatggcttcgaggctccatggtggcaggaacatgtagcccaggaggggatatgtgcctcaagctgtcaggaagagtgaggtttttaaaaaaaaaaaaaaggagaaaaagaaggtggaaaaagagggggagagaacttccataggcatgcccccagtgaactactcctccaagctggcccctacttaaaattttaaaaaattctttacattatttactttgcatgggggtgggtgcacatgtgtttggaggccacagaacaacttgccagaattagctctctccttcactatatgggtgctggtaatcaatattagatcaccaggttgggtacaagggctattacttgttgagcccaggccccaactcttaagagcctattcaggtatctgttgatcaagttggagctgttataatccaatcacttctcaatattaccatcagctggggatcagtgttcaacacatgaacaattttagggagtataacagttcatattcaaactatagtgggggatgatagggttaagggtggagttcttataaatatgatttgtgggtttgttgttgttttgtttgtttttaagacagggtttctctgagtagccctggctgtcctggaactcactatgtagaccaggctggcctcaaactcatagagacccgactgccactgcctcccaaatgctagaattaaaggcgtgtgccaacactgctagtctgtaactggagttcttataaagtaggttttaggaagctcaaggtcttttctaccatgtgtctttcttagcagtgagaaaatgcccatgaaggaagtcagtcctgaccagagctgaggataccctgaactttgacttacttgcctccagaattctgagaattttctgttgtttataagctacccagtctgaggtgttttgttacagcagccagagtgaccaatggtttcatcttatcaacaagtatttactgagagggtcctacacacctgtattggctcaggcaggggccataccgatgtcactgactgaggatgagagaggtgctcagagaactacaatccttgatgataatcataggtttgcttcaaagtacccaataatccaaggatgctgaggtccctagctgcctagtgaggctgggcaacatatagaggctctaatatattatttaatatttagtgacaaatacataaaagtagacccatcctaggatgaataaagacttgtaggttctttaaaaaggacaatttttggagttgggagaaatggctcaatggttaagagcatttactgctcttccagaggactcaactttggtccccagcaccctgacaaccacctgtaacttcagctccatgggatccaatgtctttagatgtaggtacctgcacttctgtgcaaatacacactcacacacacactttaaaataataaaaacaaagtaaaatgagtcctattaacttcaaatggactgccatcttaagggaactatagtccccatagaaaaaagccaactttagaaacaacagccttacatttagttcaatactatcaaagttgcaggatattttaaataattgcaaaccagtcagagaaaaaaacccaaatctgttattaatgacattcatacagaacagaaaaatgagcaatatatttaacaggtgagtcttggtaaacaggtagaacttgggtataagggcatgggaggtattctgaagtccagcacagcaaaccttcagatatgacaccaaatgctcaaacatctaggtgctacaggagacagtactgagctgaaacaaaatggcctagtatctttaaccacattagaaacagaacacatcaacaaactgtccaatgttcttgcttcgatttttcttttaaaatgtttatgtatttatttatttgtctatagacatgaacatgccactgagggtatatggaggctggagaataattggcagaagtctgttctctacttctgtcatgtgggttccaaggactcaggtcatcaagcatggtggcaagcacctttacctactgagccttctgcccagggtggccttgaattcactatataggtattatcttcaacacctcatccttttgccttctctgaagtgctgagactggatgcacacaccaccatgcccagcctttttctttcttcccttttttaatactacagagatgccaaggtttagatcttcaatatgggaaccagaggcagaaacgggctactctacagatttagccaaggtgactatgaagacagcattgagctaataaaaagtgcatggtggaacagtgaattaaggaagctggttttagaagtaggcagtcatggtgctggcaggcaattgtggtgataaatagattacaactaaggtctggaggccagagaattttctagttttgaagacacaaaataacttttgattgagttgagatattacacgctaagttttgggattctaacctctttatacatttatttatttatttatttatttatttttgttgagactgtaatccagaccttggtaattctccagtctcagtcttttagacactagaattttaggtgggggtcactgtgcctcgcttgggaattggcaattcctcagtctaatttggaatacgagcacaagaaggtacgtactgtctcaatcacctaagtcaaaaattcttgagcacatctatgggtgatcccagaggaaagatcagtcgtcccagaaaggagtgaagcagctgtttgaactttaaggggctgacagggacctgcaactcagcacaaggtggtctgagtggtgtctacatggcaccatcttaagacctgggagtccggggactgtgccaacactacttgatagagaaacagcacagaaaagttctgtagcagatcgctctgctcagaaagaaaaggcttccacgagagtacaagcctttgcaaagccagcaggaactagtgagccatggcccaggggcaaatgaagatgaaagcacccgaccgagagggcttgagtggaccctgactatgagagcgtaagtgcctatcaaagagtcgactggagccagggtttgatagtggtttcacatgactttggagaatttcacatgactttggagaaaacattacttaaccattctctctttcccagactcgtcttttcataatgtgtttggaagaggatatagagaaagactggcgagggtcctctactgttagaaagtcatcccaaggcctctgatgtggacaacagaacttcctaaaaatggtaagtggttataactgtcacattctagtctcaaatgatatcaggttcaaactcacttccccatctcatgctttctcgtacgatttttcttttcattttcgctttttccaaccccaaagcacatctctccggacccgctcttgccgcctctagtgcctccgccctggggcagcctagtgagcgcgcacttccggagccaggaagtgcgtcatcatctcgcgccagttcccgcacattgtgccggttcgcctcgggtttggatgctggggtattcgggtgggtcggcgttctgtgactgcgtgccgggctccggctgctccgcgctgcgatgcaggtctccagcctcaacgaagtgaagatttacagcctcagctgcggcaagtctcttcccgaggtgagttctcgccccctcgccatcgccctgggagcgtgtatctctaacttaccatcggctgaccgtggtggctggttttatgtcaacttgacacaatctagagttaactggaaggagggaatctcaattgagaaaatgccccccataagatctagctgtaggacactttcttaatgattgatggggaagagctcagcccttggtggtgccattcctgggctatggctctgggttctataagaaagcaggcccagcaagccagtaaacagtactgctcccatggcttttgcataagcacctgcctccaggttcttgccctgtttgagtttctgttttgagtttcttcagtgatggaccgtgatgtagaagtgtggctgaaataaactttcctccccaagatgcgtttggtcatggtattttatcacactataaaaaccctaagacaagaccgttgttttgcctgcattgggttcacgtgtaagaacgtgctgtttagaaactactctcacgtgctttaattaaaaaccttattgcctgaaaacagtcagagcaatacagtcacagactgcagagaggaggacgactgtggctcacccttagtctgtttaaagtctcatcctgttccaaatgcagactgccttggcgtatgcttagggtctagggaggtgagttcacatgtttagagattattttgccataactagtaagaatagtacattgacttttcccttttagaaaggattttttttctattgggggcatttaacctcaaatttattgacgttttaagctggacaagtcttgttgctagtgttgtttgccagcatccctggtccatacctacaagatccaattgtgatgacagactaaaatgtaaagacttgccataagccatctgggaagcaaaattgtcccggtagagacccagccactcagtgtcacgataactgactagtgctttggttgctgttcattcaactgttgcctgtagaagaaaatcagcttccagtgaatgtgctggtaaaaaccacttcttatccagggtcgtctattaggccagtcataggtctgtttctattctttgtaagaaatacatttggctggcaaagagacacgtttataatcccagtgcttagggcgctgagacaggacatttgtgagcttgtgttcagcctgggcgacagagcttacattgtgtgactctatcttaacacaggaatatgcacacacattgggtgcactcactccatatagaaattaaaacccatcatttcaagagtttgcattatcttagcttagatggattaattttatgcttttataattctttgtaaaacagatgctttacaattgtttagtatatgtaaatatattttttagaaagtccagaatatgagggctggagagatggctcagcacttagattactgactactcttccagaggtcctgagttcaattcctagcaaacacatggtggctcgcaacggtctctgatatgatctgatgcttctggtgtgtctgaagacaacaacaatgtactcacatatataaaataaattagtcttaaaaaaaagctgggaagtggttaagagcactttctcttcttccagagatcctgagttcaattcccagcaaccacatggtgggtggaaatactttattctgggatctgatgccctcttctggtatgcaggcatacatgcagacagagcacttacatacattaaaaaaaaaaaaaaaagtgaaaatccagaatatatgttatcatggagttaagattatagaatagtcctacttttcattttattatttcctgtaagcatacattttctcaaatgaacattattttgcatgtggaagataatttaggtgtgttttaaagtgcactgtctgctttctcgtagtggctttctgacaggaagaagagagcactgcagaagaagaatgtcggtgagtatgcagggtgctccagcttgtcatctgcctgtgggcagtgtcctcagttctctggctctcaggcatgggctgtgggaaataagctttttgccttctgtctttggcattgttggccactgttctcctggtggtgtgatgtcccccttccggttaacaaggtagcctctccccctcttatggatggcagcgaggctcctgggttagagacacaaacttcaggatgcacgacatggcaagatggcaggaatttcagcatgtttatcccagttgccccttgagtcagcatggtttggatgaggcctgtacacagtgggtctacgtttcacagaggagcccagaggtgggaagcccactgttttggtagcaggcagaaaacaggcctgcccttctatgacctcctttgtcaaattcctcaattgccaacagccctgagacatggctcaggtaaaagtggtcagactcttgcaggactgccatactcagcaaagtggcccaaggaggactgtcgttcaaaacagttctgtaactgctttgttcctaatgtgtcagaagttttatctgttagttgaatctctgtgttttgcaatagacagacagtaaaagttttctttataaacagaagaactttgtgtgtaaaatgtctggatgtaaacaatgagacccatttgtaactcacagtttattcccattaaacattttccagttcaggttgccacgaaaggaagcttaccttcctgaagatttcagattttagctgaatctctaaaaatggagagctaggagggtttcagcatgagattgagatcttttggcaagcttcttggaaaaaacgggctctatatagtactaaagtcgggtaagaagtgagatttttaacttggaggaaacatgctgcctggagcttacagactggggctttatctgctccccttccagggcattcacgtgtagcaaaatggattcaggttatttatgggaagaaactgttttctggcctgcgcaggactaataggtgtctagcaattcaacttgttcagtatttgatttttttgttccttgtgatgccagggattgcacccagggcctcaacatgctaagcatgctatttagcactatggcacatccacaggccttcctctaatcttaatatctgggttttatatgcaaggcataaatatgtcatagataagctgtgttcacagtagtgaccagtcagaattcttaccctggtagagaaaaatatagttttttgagagtaggtcttagtgctgtggtccacagaggctgcactaggtcttcctctagcctgggccctcttggccacagagaggcagagctagcaggcaagcatcaactctacgctaatttctttgataagcctaagattttggaggctatgcctagatatgtttagtggaaatgctgtattttgttgcagcagtgactgatgatgtgttagtgttcctccttgactgaggtctttaaactctttctgattatcattgtggacttttcagttaaagaacatgttctttctttttaaaacatgagaaaaaagtcagttttccattacggtagcagagtacctgaggtaactcaaaggaggaacgctttgttttgcctgtacaagttgttttgttgctttcaggcctgtggtgaggcagcacgtagtggtgggaactcatggtggaaggggctgttcactgtttagcatctaggaaacaagaggagatggagcaagtgaatatcctatagtctcctttgagggcgtgactccagtgactaagacctcacacccctcccccaaaagttttactacctcccagttaaaactgggcccaggagccagacctctggacacttgggtccctggggggtttcggatccaaactgttgcctggtaggagcgaagcagaaagctgggtgggctgctggggtcgttctcagggctgggagccgttggattgaatcctgctgcctgcagtagctgtgcctgtccggcatgccctgtgctccttctctgatgctcgtgtggaacaagtttccatctctcccccttccctcttggcagatgttcgtaggagaattgaacttattcaggacttcgaaatgcctactgtgtgtactactatcaaggtgtcaaaagatggacagtatattttagcaactggtaagcatttctgtggttccgatttatctgtgttcctaacaggaagtgctctagtaggaaaaggtcacccctttgtttacctcagagtttcattatataccttttcagacatacagaaatactcagaaagagtttaatgagcactcatttcatctgtgacctagattctgcactggaatagttnnnnnnnnnnnnnnnnnnnntctgcactgaatagtttactgtgtttatttatcaatctatatctttttaaaatgagttttcggagtaggtcacagactaacagctttttcattttatttttaacttttggcctcattatgtatcctagactggcctcacagtcttcctgcctccacttccaggtgctgagattgcaggcatgtgcatccattccaggttttgcccattccattttaatggcttcatgtatacccagccaatccctttgtgctgtattgatggctggctcagtaccaatgctgtccatatctgtaaccctgtgggttggtttttttttttaggatttattatttttatttgttgtttttattttatgtatagcagtagcatgtaagtttaatgtgtgtatgcctaatgcccagaaagccaaaagagctttggatcccaggaactggacttacatacagttgtaggcatcatgtgggccctggtcctttggaagagcagccagtctcttaacagtgataccttcagcctctgtttttattttgagaaactgggaaagagagttgagaagacctgagatgtttggacatagttactgagagctggaaggaacttagacctttaattcaggtcttctagatccagagatactgaaagatgggcccagtgctctttggggtaggtcaagtggtagggttttgttactatttgatgtaaacaggctcacactatgcagctctggctgtcttagacctggctgtgtagaacaggttggcctcaaacgcacagagatgcccttgcctcccaagtgctgagattaaaaatgcatcaccagggtttggtccccagcactgaagagaaggaaaggagcacgtgtgaatctggcctgactctaaactgaatgtttccaaaagaagccaagaggctgcttagctctgtgaccggtcacagcttgcacatgccctggtctgattcctgtggatagtaaatgtccctgtcttgacgtttcaatctccaggaacaaattttatccaacttatttttagccacaagtcctagagcagtgacaaagatggaggcagtggcagaagccagagatgaaaggcctagctctaccaccctaagcagacagcagtggattcctaaatccacttctatctccaaggaaagggccagagtggaggtaaacaagaggaccctacacccaaccacactgtcccataacagtcactagctgtacagagatatttaaattaaaagcaattacaatcaaaacttcggttctgggactatcaatgttcattattgatgttcattattgatgaaaagtctctaagataaaagtaaagcctacctggtggtggtggcggcggcggcgcacgcctttaatcccagcacttgggaggcagaggcaggtaaatcactgagtttggggccagcctggtctattagagcgggttcctggacagccagggttacgtagagaaaccctgtcttgaaaaacaaacaaccaacaacaacaaagttatctttatttttcctcactgcaatgcaagcatggtacattatatggcatgcaaacattatagaagaacgtgacgtaagatgtgagcatccctaggcagttgctgtgtctacactttctctactcaccatctctatgcagctgcctttagcttcacagaattgggattatatgtactgtgttgcagtcttcgaactcacttctcttaccatttgggagctgctgaggtggctcagccagtaagggtgctggctgaggagcctgagttccatccctggactccacgtggtggacagagagaaccaactgcacggcacacattgggagtctgttattggtgctgcggctctgctcatctttgtgtgcaccatgtttcctggtgggggttaccaccgtttatttaagcaaggccctatcagtggagcctgtttgcttttaatctttggccgtgtgtgacacaaggtgcagtgacattcttcctgtagctgttatgcttgtggctgggtttctgtagtcctagtggtgtaaaatgaaatacagtttcaaggtgaatttctgtcacataccttacatgtattggacattatcagggaagttgactgacacaaatattaagcatccttttttgtcttgtcaagctgtttgattgtttctgtcttcttcgctggattactgtgactcttctaaggtattttaatttcattctctgtggttctttgatttgaggataattatcttacctcaggacagaaagagcacaaagcagttgtataaggtgtggctatgcaactttggttttgcatcatgctaattttttttataggaacatataagcctcgggtccggtgttatgacacatatcagttatccctgaagtttgaaaggtgcttggattctgaaggtaagaggccaaccctgagttcataaatagcttttcataattgtctattgtactgctctttaaaatgggagtgagtagtgtggtatgttttggttgctgtagattaagtagtttaatatgatgctgcacttaatagaccgcaacctgcactggccatgctctgggctgcgcacagggcttctctcaggggatctgccaggtgggctcttacctttaaggctggtctagagtaggcttccagcctcacaaaggtatggctatgggactatgggtctggaaggtagtgtctcccttcttgctgggtctcagctggactccatttgctttataaggctgccagcattttttaaaaaaatcttatgtgtatgggtattttgcctgcatatctgtgcactatgcatgtgcctgataccatagtaggccagaagagggcatctgatccacatagactggagttacagatgtggtgcatgtgggtgctgggacttgctcgaacctgggtgttctggaacaaatgcttttaaccaccgagtcctatctccctccccgagagacctcttcttttaagaggttcatgtgattaaacaaatcttcccttggtcatactgtataatggaacctcagggagcatctactctcagcaggggcctggtgccctgtgaaggtcacagggggcattttgagaattctgtctaatacagacagcaaggtaaaatggcaagggtcagctattatcagttaaccagtgttttaggaacaatgggagagaagtaaatgggatacagcgctgtgtagaataaccagcataccttcctagtctcacccttgctgctagagaacatagaaactttgtatgctattaataacacatcttttacaatgtttttgtgtagaggtaaacttggtataggcgaagagttactgttgccttctttctttcttttttttttttttgtttgtttgtttgtttgagacaggatttctctttgcagtcatggcaggttcagaactcattatctagaccagactggccttagactcgcagaggtcttcctttctttctctcccaagtgctaggagtaaagtcctgcaccaccacaggaacacccagcctggggtcccattttaaaggctgctgtttagattatatttcaaaatcttaaaaactactaagaacatctcagcaaaactatggcaaaaatttttaggatcatcctaaatttactttagttctgttaaaaaaaaatctagatgtaagtaataactttccatttagtattagtggggatgttcttcttgttgcatggagaggtaggacaaacacagcaattatatataattattcaccagttaaaccagttaagagggctggggagatgtctcggtggttaagagcactgattgctcttccagtggtcctgagttcaattcccagtaaccacatgggtgcgcaaaaccatctgtctgatgccctcttctggtgtatctgaagagagcaatggtgaatacatttaaaacaaaaacaattagaatcctcacctgaagtttgtggttttgtttaaacactggttgataattgtggtttttttttttcctatttttcagttgtcacctttgagattttatcagatgactattcaaaggtatgttttatagcatatttactttttatttttatttatatgcacgtgtgtgtctttgacagtgaacgccgtgcatgtgcagttgcccttggaagccagagggggcatcagatcctcaggggattgtgagctgctgatctgatcccaggttctctgaaagaacagcaagtgctctttactgctgaactgtgtctctggctctgggacttatttttgtagtaaatatttttaagataattcccagcgataaaaaaaaaaatcactgtgtaataataggtaatatatcattttctgtcatttttcggccaagtacatgtatgatgtacagtatctttaaaaaaagaaaaacaaaacactgggagtgaacttttgctcaccctaacgtcaagttggttgtcagtgtctccaggcctcacctttattctaagggattggtagcagtcaccctttgttaggtaccttatggtcgcgatctgtggttctgattactgatgttagcctaggcatgtttgccttcgtctccttatttgtacaagataaggaagccaacagtttgttcagttcttgtaactcatcgagagggtgtagtgtgctgtggtgcaggtctgagcacaactgaatagacttcttttcctaataccaccggtccatctttaacttttcgtggtcatcttcagtagttttcgattcttatggtagccctttctcaatttcaaatggaaatgatgggaagtacatggaacccttaagtattcaccagttaaaaggatttcaacaaacattttaatgtcacatgcatcctgaaacaaagttgaacttggtagctaacgtggcttcccttctggcttcagttcctccaactatgaggcacagattgtcttgttagctgtcgcagctgtttatctaggattttggtatggtgatttttataacttactttttctagtattgctagatatgcatttaaatactatgttagctttccatgcacacctctgtcaaatgtgcacatgtgcacacacatgtttatatttgtacagagtgagcagggggagagatgagagttcttcttgctcgggttgttttagtgatgacgaaagttaagcaaacaaaccttgatttttttttttttttccttttcagattgtcttcttacataatgacagatatattgaatttcactcacaatcaggcttttactacaaaaccagaattcccaagttcggccgagacttctcttaccactatccatcctgtgacttgtactttgtaggtgcaaggtactgatcagattatttttgctttctcctttccacctctcacacaggtagctggcttctctttttagattgcctgtagactttatctacttaagtgtccttaatagagaaagtgatgtgtcattactgtgaaagggaatcaatcttagaaaaagagattaacactatatatatatacatatacatatatatatacatatatataatagcctatgtgttgatatgtagttttttttttaaagaattatttgtttattttatatgagtacactatactcatatatgagggcatctggtcccattgcagatggttgtgagccaccatgtggttgctgggaattgaactcaggatctctggaagagcagtcagtgctcttaactgctgagccatctctccagcccgatatgtagtttctagtaggtggaattataatttttttgtcttattcagtatcaatgattaatttctctgtggaccattttgtcactaatggcatatgtagttgtagagttgggttaaaacctacttagagggctggggatgtggctcaatgctcaagttctttgtctgcaagcatgaggacctgagttacgatcctcagcatggcagtgcaggccagtgacaccactgctggactgtgtaaggagatcccttggagctggggttgcagatggttgtgagcggtctgagaggtgctgagaactgaacttgggttcctgtaagaatctcagatcttaaccaccaagatgagcatagtgtatgcctgtgagtgagagctgtcatgagcttctgaagtttatacttactcacccgaaatgcttatagttcaccagatcctttgtcccttgcagctctgaagtttatagattaaacttagaacaagggcggtacctgaatcctctccagacggacgccgcgtgagtactccagttctactgctgcacgaattttgcccaggagatggagccagaggctcgtgttgttatcaagtgacctagttgcattaaaccagcatcctgggccatcatttaaaagaacatcattaactgctcttaatcagaactgaaggtggtggtccgtttctttccttttcccaagaccactaccacctgaccctatgatttcttaaaagtttaagttcttatataaaaagacttgtaatttaatcctagcacaaaggaggcagaactgggtggatctcttgagttcaagaccaacctggtctacatagcaagtttcaggccagctggggctatagagagagaccaggccagccaggattttatacagagaccctgtcttaaaactgcaacaacaaaactacccaacttttaaaaactcagtttattatttttacttttattactaagttttcatcaatgatttgttttgtgttactctttttttgtgaattccttttttaagacagggtttgttaccttatagctctggctgtcctatataattcactatgtagactagcttagtcttgaatgccaagagatctgtctgagcttccctcccaggtgctgggcttaaagttacgcactgtcacactcaatttgtggaaatctttaaaattttattcttgattagtagacatttaaatttttagttgttttttgtttttttttcttttgctacatattctaagctaccttttcctttaaaaaagttttttggtaattttattgttctatacttactcttttgcatttattttgctttctgttccttttgagacagtgtttccatgtaccctgtgtggtctggcatttaatagagaccaagctggcctccaacttgtggcagtcctcctgtctccctctccacagagctgagatgacagacattgccaccatgctcagttatacttttattcaaaaagacattcttcaggagtgaccctaccgtctacctccttataatgacgagtagcagatgtgcagaagagtggacgcactccccatgccgagtgccgtgcagccctctatctgtatcagctaatagtgacagcagggtctggtagggcccgccctgtctccgttcacagagggcagctgcactggggtaggcggcttgcccagggccctgcagctaggcaggtgtggaagcgggactgctgcccatctgtacatgcagagcttactacctgtgccttatctctacgagagctttctgaaagaacatggagtggtaaaaatcctgagctggaaaaatgctttggttcttcccctggtttaaaatacttttgtttaaaaacttgtaatttccacccagttctgcctcctgagtgctgggattaaattacaagtcttcttatacaagaacttaaacttttaagaaatacattattatgtaatgaaaaattacctgctcatcagctgcttaatttcctgttcataacctctgttatttattacatatcctttatactctggactggagcattttgttctgtgatttaatcctcacagtaacccattgaggaaggtcaaaattcactccagcgagtaagaaaatgaggctttgtttgcacatccaggtcttgaggttgccatagtgatggcctgtgtccttaagaatgctgccttgccttggaagaaaatagaaggacctttcttctcatggtgggatagtatttcagaaggagggcttctcttgtctggcatctagcaggtagtgtccccctgggtattggggctctggtgactgtgagccatgccgttactcacccgtgcctcggtgcatttcctttgtggatgagcatctgcatatttctgtccacaggctttggatgcctacagacttagagcgttcattgagtgcctctctcttcccctgagctagatgctccctaatactttctcctgtgtttgtgttgctgtttagggagaacaatgtttgtgacataaatgcagtgcatggcttgttcgccacaggaacaatagaggttagtgcgtgttcacactgaaacaaatgtgtttcatttgttgacagtttcagtttgtgtgcattccacacttgccactgtgcttatatagagataagaagacaacttactgtagttggttccgttcttctgtgtgagtcattgaactcaggttgtcaggcttggcagcaagtccccttacccactgaactgtttttcatttcaaaaaagattttctggggtctggagagatgactcagcagttacaagtgtactgttgctcttatagagcacctgaatttggtgtccaccacccaggtagagcagctcacaacagcctatgacttgagctctggggatctgagatcatcttgccctttgggcacatgcacccacagactcatacctatatagagacatacaaatatatccaattaaaaatagagacctgcctaacattgtgggacctaggtttggtccctagtggtgtctaaattcgtgagacaatcagatagtcagtcaaaccaattaattaatcaatctttagcttttaatgtatttaagaaaattacacctttagacatgttgaaaacagttcagtgatagcgtcccacacattcctttttaaaataaacatgtcattttctaagaggttttctaagccatttgaaagtaaattatgaacattaggacacttcatgcctaaatatttgaaatacaatttttaaaaacaaggactcaagctaaggatggtagaccataccccaactcttggtagtagatattagagaattagaagctgacggctagccttgtctatacagtgagtgcaagctgatcttggctataaaagtctttgtctcaaaaagccaaaaaataaggtaggcgtggtgaagcacgcctttaatcccaatttgggaggcagaggcaggcggatctcttgagttggaggccagcctgctgtacagaattgagttccaggatagccagggccacacagagaaaccctgtctacaaacaaacaacctcccaaagctaaaaaagtaaaaagtaatacagattaaagaaaagacctatccaatgatcttaactactccggagactaacggaggaggatcacttgagccctggaagtcaacggtagcctggatgacagtgaggttcttattcaaacaaagccataaagacctttttcataaaatataaatgtcttcttcccgtggagccaactcaagggtcatgtgtctagttgggacttcttcatttttcttaattatgaagtaaatcaccttgtggtgaaatacccgacactgcctgccggggttacaggttaaaagctgagctttgattctgtatgctggtaaatgttcaaaagttttctagttacacttttacttaaaatgtttttttcctctgttcagggtcgagtggaatgctgggatccaagagtaagaaaaagggttggcgtgttagactgtgcattaaatagtgtcacagcagattcagagtaagtagcaatcaatttgcagtataagtgtcagtcaaccttctgatttaagtcagcgtgtcagtgtgaaattaattgccaaaggatgaactcttttctgactcacatctgagactggtgtcgggcattgttgtcctataaagctgtgggtaagccagggagattccttctctccagtacttctcagagcagcgtgggattttagttttcattcccccaggattggtgactgggcaggcgtgtgctttgaatgctatgttgaaggaagcaaagggtgacgttttctttttttttcttgttcttattggtctacacttaaacatttagagagtaatacatacttggagaggaaaaacatgtgacacaggtagcagcttgagtcaagtaagaacgagtctttgtcatccactcaccagcatgggctggcacaggttggcacccctgcccaggtgctggctgtaggcagaccaccctcaggcaggcctttgctccaggcttatctgttcagaaaagcctttctctgggcactgcttctccagcacatcccgtgtacttcagggagagtttatatacttcatgttggagggtaaagcgtctgatggtaacaggctgcaatgacactaaggaccctaaaatttagtgcatgatttcctttagggtaggaactcataactcctttgaaaagatgtttacatggaccatctttgattaaaaataataaagaatggctcagctgctgcagctcagtaggagagtgcctgtggagtatgcaaggctgcagggtcaaccttcactattacaggagcagcaagccagtgtataacgaactaatgatacctctttctaatacataaatcttactctgtattaagaagtaaacttgcgtgtttgttttaaactgctacatttaaagtgacaatagagacattcatttttcttgattgctttggggtttattttaaaatgataatcaacttcactaatcatggcatggtgtagaggatattaagaaactaagctaggaagttcacttccacatagaataaactaatgcaaaaaatgcatattaaaggttttttgtttttgtataaggtgtgcgcctgtgcatgggtgcagatgcctaaaaaggccagagggggccactgcatcccctagaagcagagcttgagttacaggcagttgtgagcagcttgtgtgggtgctgggaacctaattctgctcccctcagagcagtttgtgctttccctcagagccagctcttcagttgccacattgttttaacccatcagtgttaaaaaagaaatcaggaaatatactaagaacaaaatactaaagttactcattctaattttctctcactcttaagcattgatttgtctttgaattatgtcaagatgtgtgctctgagttccgtgtgcccttagcatcacaacctgactttgtttctctttgttgttgttgtttcttgtttttctcttatgaaatagtctcactccagcactgcctggcatagaactctgtatacactgtgctggcctcaaatcacagagatccacctacctctgcctcctgatgcttggatcaaagttgtgtgcctaatgacttgagttcagtctctggatcccccagaggtggaaagaaagaaccagtttcacagagttgtcctctgacctctgggtacatccctgcgtgtgttcgcccaatcctccttttgtttttaagatttatttatttatttatttaatgaatgtatgggagtacactgtagctgtcttcagccacaccagaagagggcatctgatcccattacaaatggttgtgagccaccatgtggttgctgggaattgaactcagtacctctggaagagcagtctgtgctcttaactgctgaaacatctctccagcccgctttgttttgttttaaagcaaacagatgtgtagtagtcactgataatacatctcaaggctatttccagcataagtgcagtgactataggagatgggatactacacagtattaaggacaaggatggaaaaaggccatcttcactttggtctttagaagtaatgggagtactgtttttttctgtttatgattttttgagacagtgtttctgtgtatccctggctgtccttgaactcactgtgtagaccagactggccttgagctgggagattgccctcttctgtctgtgctgggattaaaagtgtgctcctcatttgtatatggttgaaatattggaatttggggtttttttttttaatgaaaattgattcacattttgtactgatttttttgttgttgttgttgttctttagaggtaaggaattttcagctgttgtgataaaatattttgaaaataattatatttagtataacaaaagacactaagcagtatccgaaacagaaagaatagcagagacccacctgctgtgtagcagaatttggccaaccagagcctctgggaacatatccaatgtttgtagttcagtggttatttcccaagcatctagaactgagtttttgggttcctgctaaattgttttacagaaaacctaatataaatataagcatctaccaccttattgagtggccactgtctccttgtcctcagctgaggctcctccccagcatgtcctcaccattctttccttttcctcctcctccttttcttcttcttcctcttcttcctcctcctctccctcttcctcctttcttttcagtttattacatttgtttgattgactgattttgcacgggcagggcacacccatgcatgtagaggtcagagcacagctttgaagtgagtcttctttccttctccctgtgggtccagttgtcaggcttgggagcaggtgccccatggttggcttcactgagccctctgtctagctactgttagttcttgagctaggctctcccctgtccatgtgggctgttaactcctgggtctgagggagtctcctgggtatctggtatattgtagacacacagacacctctcccaatttattgttattagaaagaacagaggtagcagttaactagagctacctgactgcttaacaggtagtgattttttttctctttttatattaaaacatacgtgtcaggctgccttcagacttcctgcgtggctgagaatggccttgcactcctaatgcttttcctcccaaatgctgggactgattacaccaccctatccctaccttagtactggatatttatttaccagaggctttggtgagttctttatgaacagaaagtgacgtcttgttaggtactttaattttatgtgttttatgaaagaaaactctccaccaatgacatactcattgttcagcttttgagaattttgtttcagaagtatgttagtgtagggaagggtatataaatacccatttttagatatatacctttcagtgagaaagaaaaacatacagttgtcatagagttttattaaattcttataacatttgttttgttttgttttgtttttgtttttcgagtcagggtttctctgtgtagccctggctgtcctggaactcactctgtagaccaggctggcctcgaactcagaaatccgcctgcctctgcctcccaagtgctgggattaaaggtgtgtgccaccacgcccggctcttataacatttttataaaaggacaatgaccatgaccatatgtgtttattgtcatcagaagaacatccagaagcataagaaaatgttaaagattgctggtttttcttctgctgattttttcaagtgatcttattgtattgtattttttaaagatttatttatttttaattacgtatgtctgtttgtgtctgcacataagtacagtacccatgaaacccagaagagcgggttgggtcctcgggaactagagttatggatgggttcttggaatcaaaccctggtcctctaaagagcagccagtgtttttaacctctgagccatctccctagcccctgtatttttctttttaatttagctttatgcttttcctacaaaccttgtagcttgtcacttgtgttatttagtaagtttagtaattttagtaaagctagaagtactggatagagcaggctgtctttcttttccatgattgactgtctgcctgagaaagtcagcagacttgcctggaagccagggagaattaataggagagttacaggagctggttaggaaatgaatgtgcagaagtcagtgaatttggtatcttagcaattccccagaaggaggaggaggaggtggcagaaaagttctcataacataaactacaattattgaaggagtcattaacctgtctgaagaaagtgataaaattgccttatgaaataagcctgggaggagtaggaagataattctgtatgaacaggtattctgaagttcattttgaagagtaggtgatggagtctgaggagcagcagcctctccagccgctgctcagtgcagctccaggctaaggctgtaggtggcaggagaggcttgctagtgctccgggcatggtctggccttgaagggctgggtgcagagctggtttctacttgttgttgcgggacatgatctcactgtgtagtgtacctcagcctcctgagtgcagggattgcaggcaggcatcagcacagccagctctggtctacttctgacctaatctcttttttctaccttaatgttttggcgctcgtgtctgtagctggtgcatgagaagcacgtatagaattgtagccgtaccttttgttcttcagtaccatcgagatttaggtcttaggcttttattttagatgaatgaggttgatctattttatttttaaaacgatttgaaattttgaatatgtgtgtgtgcccatgagttcaggtgcctgcagagagcaaaggtgtcagatctcctgagctggagttataggtagttgtgagccacctgacttggatgctggctggaattcaaatttgagttcgttgcagaagcagtgcatgttgttaacaactgagctctctctcctgccttggtgaagttggttttacatcagaagtaagcatacccacccatatcccaagataaattgtttctctgagaatgatagggatgtttgagggctgggaagatggctcattcaataaagtgctagctgtgaaagacatgacttagtttagatccccagcatccatataaaccagtcactaatctcagatctggagagatggagacaggaaggtccctgggagtccctgaccagcaaactccagaatcactgaacattctattccaaagcacacatggatcgcagatatctgatgttgacccctggtgcccctgcacacacacggacacacacacacacacacacacacacacacacacacacacacacacagagggagagagagagagagagagaaagatatcctggagaagtttctgaaaacagtgttctattatctgaatagaatggaagatgaaggtgggttatgggattacatttgtgtgggaaatgtcttttttattatgaaagtttggatagagttataaacaaatagctggtaacatgattttccttgttagatttgaagtgaggacaaacacttgcttttcaggataaacagcttacccaccatctctgcattgaagtttaatggagccttgagcatggcagttggaacatccacagggcaggtaaatgtcacatgtgagcatgtgagccagtattttggatgtgtattggaaggcacttggatagtgagtgaggccggagtggagaggtgctccagactactaggtccttttagcacctcagaagatcggtctagtcctttgatgttagagttgaatcgaggtagtcttcagacattcctgataggggtttggaacagtattttttagagtgtgtggcccaaatttgggattctaacagctttctactcttggagagtcacagtggatttaagtacatattttgaagaccctgggaatcctgcaagtaagaattgtgttcactaaatatttccaagatgtgtgcatgcaaagagccattttttttctttttcttttgagacggtcttgacatacaatgctagctggcctagaattctgtgtagaagaggctggccttgaactcacagagatctgcctgtctctgcctcccaaaggcatgtgccacaatgcttactcaaggtcacttgttgcagcagcacctgctgtgtcctaggccacagatttgctaattaattagcaagcaaaacattcttatgaatatctgtccctttcttagtatagatcagtaattatcaaattagtggatctaaaaactactcccagggttaaagtcataaaacttccaagagctgactttagtgttaggctctgactaagtatgtttgtcatgttcatagaaggttatgaaataggtggcagtcattattccaacttttttgttttttgtttttcttcatgtgtatgtctgtgtatgaggaagggaggggtctcttataccccatgatggcttcatacttgatatgtagccaagaatgactttgaattcctgattttcttgcctccataatcccaagtgctgagactgctggcatgtgccaccatggctggttttgctgggctggggaatggacttggggctttgtgggtactgggtcagtactctagtagctgagctgcctccccagttcccattactctgagtattaaatgtgtagtttggaaatggcttgtttgactagaattaacttttctcttctaggtgttgttatatgatcttcgctcggataagccgttgctagttaaggatcaccagtatgggctgccaattaagtcagttcatttccaggattccctagatttggttttgtctgcagactctagaattgtcaaaatgtggaacaaggactccgtacgtactttctgctgcagttgctctctgttttccttgcctgttcccagtgcttctttttttctgtgtgctttggcagctcctgtgggtccttgagaagggggtgctgagcagccatctgggaaccagcatatcagtcactttaggtcagggtgtgtctgtgctggggcaaagctgacctgcgctggcttcagttacggagcatcctgatttatgtgcacttgtgcatgaggagggcttggactcaggtcatcaggctggtggttagggcttttatcccctgagcctagttgccaggcccctggcacacattttattggacacgtgttagatggagagaaagtcactgtgaaatagaatctgcctctgaagagccttttggtcctgcccctaccatcttgattttattttattactactgcctgtgagaatggctatgtgccataatgcacatggaggtcagaggacaacttggatattactcttccaccatgggttccagggttgaattcaggtggcacagcaaacactttgacctgctgagccagcttgctggctccatcctgagacctttcagctcactgactaccccagcagagttctgggagctgctgattttcttccattctagagtcagtgcatgtcccagattcataccctgtccccatctcaaacaagcagggtctagaaatagtaaggacatagtaattttgtgtattggtcagtctgtctgtctgcctttctctggtggtaattctagggattgaacccaggtccttgtgtgtgcttagccagtgctgtaccactgggttacatccttaatgttctttgtactttttatttcaagagagggcttcagtcagttacccaagttgaccttgaactcaccctaccctaggcagaccttcagcttgtgatcctcctgcctcagtctccccagttggtagtattacatgcctgtgcttcaaggcctggctaactttgtttcattttttttcaagtagtgttttcttaagaatattttagtgtttcctccaactacaaatgttattttaaaagtactgtttggattgctgattttagtctgccttctgctttcacttcatgtatgtaaagttttttttttttaagatttatttatttatttatttgctttctttatatgagtacactgtagctgtctatagacacaccagaagagggatcccattacagatggttgtgaggcaccatgtggttgctaggaattaaactcaggacctctggaagagcagtcagtgctcttaaccactgagccatctttccatccgccacctccccccgaacccccagttgttttgttttttttttttttttccattttttattaggtatttagctcatttacatttccaatgctataccaaaacccccactcccctgcccacccttgtttggttttaagacgaggttttatgtagctcaggatagcatcagatttgctgtgggtcccaccgtgcctgggctctttttttttttttttttttttttttaaatttgagtattagctggatgtgatggctcacccctgacatctcagtacttaggaacagaggtagaagatcaattcaagttcaaggctagcctgggctacagtgagacttgtctcaaaaccattttgagaggactgaaagtaactttattacgtcaataaaataaattcagtacagcaaattacttctcttactctcttttaaagatggaaaaaaaaacagttttattcatgtgtaagtgtgtatctttgtgtttgctacattgtttaggtgacctcctgggagcaggaattacaggcatttttgtgaattgccttaaccagggtggcgtgaactgaactcaggtcctttggaagagcaataagtgcttttaactgccgagccatctctttagccttacaaactcttaataattttgatttcaataaacacattaattctaaaggctaaagagtgaaggtaaaaacagttctgagaagacgctgagcagaaggcctatgccctcctcactcactgcctggagtgggtaccgggttctacaggcacctgctgtgtttggtgtggataatggtgggtcaggcacagtccagccacctgtcactttggcttttctagccagtacttttgagttttttaaattttgcattttggggctagaaagatggctcagtggttgagagcattgactgctcctgcaagacccaggttcaattctcagcatccacatgacagctcacaactttttgtaacttagctctcagaggcgcagacgccctcttctggactttccaggcactgcatgcacattttgcataggctaacaactcaggctaacaacactaatacacataaaataaaaataagttctcaagattttatttctaagtatggcagtttaatctccagaagtggtgaccttactttattcctttggctctgtcttgagatgtatccgttctagttactgtttaacttagcagcggatgaccagctcacggcattcctgagttcttggaaacactaccctgatgcttacaggagttaagcattctgcttggtaggctttgagtttgagggttttgaggacttgtgggagacttttcatatcttagatcaataatttttcggcaaccctaactaattgatagaaaaacactatttccctatgcagagtgtacttgcacacttctacacttaagaggctgactgaggcaggagaaccaagagtttgaggccagcttggactatgcagtgagactctggatcaaaataataataataataacaccaccaccactaatcagttgtcttactgtttttcattgtataagtgcatacatggtgtgtaattagagatagtttgactttgtagataaggcttacctggaactcactatggaacccacacaagcctcaaactcaccatcctatctctactttctgaatgttgggattatatttgtgtgctatcgtactagctcgtatttccaagaactcccaagatagtataaaggtgttcatttgacctggctcccatcctacctaagcctagcagtagctccatttggatgtgtccttccagacccctttatgctatgtttcccgtgccctgggtttctgggaccaatgacccctttgtctcttttgatccatgctgttgtagttcttgttctcttcctcttttctttgccctctccttcccacttcagtgggagcttgctaggcgagtttcactgttgaacaagaacttggctaccttttttcatcaacctcgaaataaccatcctgcctgggcttcagctccacccacttctgccctgggtgcaccacatcctggtgtcttctggtaatgacttatcgctgcaagagctggcagaacttgtcagcatccccatttgaagacatcacactgtaattacagcaatcaattttattttggtactttttgtttcttaagactaagtgcttcctcttgactaacagattacctggctttgtgtgacctgctttccttgtttctcttttttcttgtctttttccactcctgcctacctctgggccctcttcttagttttcaatagtacagtagatgtctctccacacttaaagtggaatgttggagccttcaccatatagtgactgatgctccggccttacaggattctgggttgtacttggttgtctctggggtttggtggcactgctacatagcttccctttaaccctaatgtcttctactgtgccctagcacctctgagactttgagtcttcttctgttttgttttgaacaggtcaattcatttctaaaacaaagccgtctgatatgctgataagacagagaagatttttgagtctgagtcctttccattagcttctttcttttatgtggcactatctgggttgtgtctccattttattttctctatgtgccattgctaaaagctgtctttgatgatttcagtaattcacttttgcttactgttttaggggaaaatatttacttcgttggagccagaacatgatcttaatgatgtttgcctctatcccagctcaggtaggctcacgctcctgcgcttgagttttaactgcgtttgcttcataagatcacacttgattgctcaggacagttcttgagtttttcatctacttggaagaagaaaggacaggaagtggtatggatgattcagaaaggcgctcatgactcagtactcagcccgcctagctattagtagaaactagtaacaaatgtaggtaggtggcaggtgaaatgctattttggtgtattcttttatgtgattagtaatggcatgtggaaattgaggttagagatttgaaggaggatggtaataaaggtttggagatactctgcatcaggtactgttcagcaaattatatgataggttttgaaattcagcagtaccttcagggcagctctcaaatggggtctgagaaaagaaggagagagccctcccactctcaagccctgtcctctgttgacggggtagagaggaaagcctgacatgccccactgcacacatgctggcagtactgtgccagcatgtcacagggagtcgtgagccagagctgggggtggggcggaggagcaggggaggctttcagggtcttatgtggagggcagtcacggaatgggattggagtggctttgtgggtaaggtgattcaccaagaagacaatgtcagaagagtaacagggtcgtgggagggctgaagggaaaggacaggtgggtgcaggtggtcacctgaccagctgggctccatctgtcaccagagggcccacacagataaagagtgggccgccttagaactgcaggacccatgaaatagtgtcctgagttgagcaagccagcatgtgtgtttctggcatttacgtattaggcattgacaacgaggggtagtgatagtttgtcacagttcaacacctggtacaccgtaacgtatatgtctaggttagcaggtaagaatgttctgaagtaagtacagattgatcattgaagaagccagagtgggtatgaagacccagggggacataggagacttgaaatagcagaagccattccatttcgagcaatggggagaagagcgaatggatacagcagcatcaaagaaccatgtattactgatgctcaggtccagcctgagacagagcctgtggctttgtacctggggcctggaggaaagagcagactcactgctttgagtatgagtgagaaatacaagtctatcacttatcgtattataatcctgtgtataatcagtggcccagaattagttctttctatctggcttttgggtttgtttatttatttattgcttgcttgtttgtttttgttttattgagattctccctatatatttcagcagcttccctgaagcagtttcttgcccaaccaggcttcaaactcatgatcctctgcctcggccttctgcgtactgcaattgtgggctggtgacatcatatccagccctctgtcttgtaccacaagtggtcatagaagtagggtaatttaccagggttagttacctgcctggtataaggcaaggccttggttagaaccttctgaagtggactctagttacatgctcctagtggggagggacaggcggtggagggccttgtcatttcatttattagagttgctgggtcttatgctgatgagtgtggtcacttctgcaaagttgagggactcattgaggggaaggtgctgaggtattgaaatgccctcatgtggattctgggctacacagaagctcagtgagcccagtgaagtagtagatggaaaagggggaggagaaagattggtaggtgagggagaagcagtctgaaagggtggcagagagtgataaggggacttcactcaggaatataccccctccccccggcacaaacacacatttcctcttcctcatcgtgttaacttttctaaggtcagaccagtcttctggtagagtgtatgtctcttgaatatatgtggttgttcctcccggtgtcacttagcgtgttttctatcccgtgctgaacctaaagtagcagtgaagggttgcctgaatttagtagtgaggtcccccaacttgctagaattcagtaaggtctccctgcttgatgaaatgtgtttaggtttatggacaagccaggtgtggtggcacgtaccttaatcccagcacttgggggcagaggtatgtagcagaatgtgtgatcacactgtgaaccctgagagtgtgatatttactgaaaaaacctttttctagtggtcatgtggctcagctctttagcacacacctttaatcctcttggctggaatacagacatgccttagtacacacctttaatcctaaacaatgaaggtaaagctagtttgtagaaggaagcacccacagttgaaagtgatgtcttattgattggcagacaagtgatgaatcagagaaagatttgatagaacagaatatgcccaactcttatgagaagaaggaggaaagggaagctacttaagagagagtgcagagagagaaggcaggcagttttaccaggacagtaataaagagataggttgcagagagaatcagaagattagaacatatggccaaagtgagacgaggccaagcagggcaatttattaagaaactgagagaagctagcttgaatcagtcagcttgaagaggagttgagccagaacagctgaataggaccagccagccagagatcagaaggaactagaaagggtgagcttattcagcagtaagtctcagaggctgaaacattctaggtctagattagaagcttccaggactaggcctaggttagcacatggaggcaatcagcctccaagatgacaattacaccaggaaaataaaaattacttttatagaggtcagtaaatctcttgaatttgaggccagcctggtctacagacctaattctaggacagccatggctacacagagaagccttgtattttggggaaaaaaatcatgaaggcacctcaagccaagctgcaggctctgcatgccaagtatcattccagcagatcatccgtgtgagccaagctgcaggctctgcatgccaattatcattccagcagatcatccgtgtggggagggtaaagttggttcagtgtgttcaggaatcttttaccatgtgtagtttggacaaggaatggctttttctgtcaaatgacttagagaagtacgccaggcaggccaataattgtttcgcaagacagtgtgtgctgccctcgcaggttggcttgggctccttgctgtgctcagaggttgtgctctgcaccggctttaccgtacccatcttccctccactctgtgctttgtcttcatcactgtgtgcttaaccatagtttagagaaggtaaaacctcattcttttccacacactcagttttggaataattcagacctaatcatggcacatgtttagtaatagtttctttgtacttgtaaggcagctcagaatattgagaaatgattttgccttcctggcccttacctgactgcttacgtggcacagtttcttacatggagcagccagccattctgcaggtcagggcactgccagaggcagcacagctctgggacccagtgtgcatggtgtgacgacacaggaagcatgtaaagatgacacatgtgtgagtcgcaccccagcctgttaaagcaggtccagaggtccagagccattggcagaagggaagaaggtgggctttggacttaagaaagacctgcttcaggcttaattatgcccattatgaccctcagctttctcacccaccaagagagagctgtaagagaccagcaggactgtggaaaatgtcatagctcttgtccctgtcagcatcctcccacagggtggcatgaggaacaaccatggggcatttgcacatagcactcacaaagtggagtcttcacatgtcagtgagaagctgaagatgagacacatgtgtccctgctgcccctcttcccagaatgtctgccttgagccattgagagtgctgttgaagctgtgtgttttagtgtggtgcttttcaaacatggttggccagccacctgcctatagccttccttttcatccctgtgattgattcttttgtacattacagtcaagatgaatacctagcgaagtgtaacgctgcctgtggttttgttctgtcctttcttgacactgctgtgttgagctgctgcctacaagctttaagttccttcctttctgtgcttttatcacccagcttggtagcggattgcagatggttcagggagctcccccctccccgcccccccagcagacctgccataaacactgtttctggttttgtgttttgagtgttggtgagcctttctatgacatacacccagatgagttctgattcagacatgtgtctgaggagggcactgctttgtcagatctgtcaccactgacactggaggagagtgccttggactctagttgctgggcggttttccttctctgaaaagttttctctgaagagcaataagcagtagcatcttgagaaacttagaaactgctgttcgtaacgctgccagcgtcctcaaaaaccactgctgcttattagaaaaaatgcctccgttaactccatgctcttaagttaagtggcctttgtgctattcttggaatcacctttgctgtttgtttgacattatgttagaagcatcaagaaggtgagccagtagatcccatgtagacggtggaattcttttttcattttgttgggtggtatttagactacttaatggtttatttgataacataagaagccttttctgttttgagtggaatttttattctccaaattatatggggctggtgagtttattttgaagggtgccttgcttgctgagatcatgtacaagcttataaaggatcctgaattacctgtaaagggttggggagatgtcaactgatattgtgtgtagtcatgagagggttggctgtagaatatcttgccaccttgaaggtgcttcagaaaactttaggaaactatagttaactaaaattaatttctctagtggttcattcttttaaaactccctaaaatgatcatggcattctaagggctgtttagtgacatatgggtcttaaaaatattttatgtgtgtgaatgttttgccaaaatgtatctatgtgcacaacatgtacagatcattgtgaaccatcaggtgtgtgccaggaactgaacctggctcctcacaagagcaataagtgcttttagccactgaaccatctctttgaccctgatatgtgggtcttttgaggtaagttctatattacactcctataatcatttcagtctgcagtctgctgtgaagtttaatgcagaaattctggtgctggaccttttggttccttgactcctgattccaggaggggagcctttctctccattattattctcatactgtacatacatatgaagctggaaactccccagacctagtatagagctgagtgcctctccggagcctgctcatggctttagctcatcaagcctgggtagttcacagacagggatagcagctcccacaactgaggtctcttgcctaaaaggcaagactggcgaaagggcagctcaagcattttacattttgtagaaatgagtacttctcaccacttgtttaatttgttcattgtatttatttttaggaatgcttcttactgccaatgaatcccccaagatgggcatttactacattccggtaagagcacagcaagtttttgtgtttgaactggtagtgttgacagcccttgggctctgtgtagctttgctgcactgtagattcactgtggatacagtgtgttctgtggcccagtagagtaatgtctcagtattatgttggccaaatgtttgtgctgtttagcataggcttgaaatctagtaatcttcagatatgctttgttgtttgttttgctgggaaatatttcagaatctagaacttaaaactatcaactaagcagaaatctaaatcaaaactaagagtctagaacagtgattctcaaccttcctaatgctgcgaccctttaatacagttcctcatgttgtgatccccatccataaagctatttttgttactacttcataactataattttgctactgttatcgtaatacaaacaaatatctgatatttatgtaatgtaaatatctgatattcgacccctgtgaaaaggttgttcaactcccaaaggagctgagacccacaggttaagagcttgctggtttagtgttcttctagttacctcactatagtttgcatgttttagaaataagttacacactcaagaagtaggatcatcaggattatcagcaatgacatatagtttagattatcatattgtcattcttaaagaattgttcttctacaccaggagcttctgtgctttaccttttggtctatagaaggagagaaatggggatgtgttctcttagtcagtaaggcagccttcatgtagagctggcacgagtgacgggtgttaccagtagggagacttgagagcagtgtgggctctcactgctgccagcctcccatcatggaagtcttggttggagtagttgggttatctgtggattggttttcaccagcctccacctgctgctgagtttctgttgtcttaggaggctgatgctgcagtgctctgtagtgtttgctctgagtgatagtaaaatgaaggctgttcaaacaggaagctgctgttctcctctattgtcaaatgctcctcttcccagcctcacgcatgccgttttacccatcttcccacgtttttgtggctttataggtatttgtttgttgcatcagctgtgtgccaggcactgtgctagatgctgcagcacacaatacatagtatattagcattgcttcatcctcaggattaaaacgggaagaaaggtggtttcaggtctgcaccatgagctgtaggaggaggactctttgagagtgcctgggaggagagacccttcctccagagtgggctaggtgcctgtgagaaactcagtaaactacccagagtgactttggggagagactggagcttgagtctgtagactaggtggaaggatggggtgagccacagaatgggagtagcatcgcagccgcaggagagtgcctgtggagagcgcagggagagggtctcatggagcagagcaagtgccaactgggaagggtctggaagtgtgtgctagggaggcgtgagagcctggcccatcatgagcagcagagtgaggaagccagggctgccctttggaaaggttgtttgtctctacaaagagaatggcatgggatctaagctggaaacagctagaacaggctgtggcagtctccacgagggaaggcagtgctaggctatacttttcagcatcaggacttcggtaggtcctataaataaagaaacaaatctgactcagagttaatgtccacctgtgaagatgcaggtggactataagaaaatgttcctcttgctcgcacctccctgtcaagggtagtctcttccttctccccagggcgtacttactgtacttttgagcagctagtgccacatcgagagggaggctccagagtacagggtggtatcagagcggacagtacaggccaagagcccgtgtgccacgtggcacagaggaggcaggtgtgggtaggaagatagacttggtaataagtttaaatatgggttgtgaggaagaggaaagaaacaagggtgactccaggttctgccagggcacatgtgtgcatgctgatgtcatttccatccaggaagaggtgggtgaataataaaaatattttccttttgatgttttttacattttgaaatgaccttttgcagaaatggcacaaatgttttaattacacaaataatatatccatgttcttattttcagtattttacaaagtataagaggaaaaatgcatactctgcccccatagatactattcatatttggaaacactgtctttcctgttacattgttaaatatgtggatttgatttgatttttttaatattcagttttgcttttgtgtgtgtgtgtggctgggtctcttgcagcccaggctgtccaggaatctgctgtgtagccaatgatgacctagggctctcctgatcttggctttgcctccaaggtggtgtgctcgactatgaatggggacatggtgttctataagtaaattgtatccagtcctatagaatcgatcttaggtatagtaactccaacatagtcacctaaagctagcattcacaggcactgggtttaatacctaacactggaagggaaaaaaatcacctaaaattgccagacacattgggtatacccatgactacagaattcgggggcaaaggcagtaagacagccttggctacatagcagtcatttccactatattgcttcttttttttctttttcaagatgggatctcactgcctggccaggttggcctagaacttgagctatgtagcctgtgctgcctcaagctcttagtcttcctgcctcagcctcctcccctcccctcccnnnnnnnnnnnnnnnnnnnncgataagtcattaccagaagacaccaggatgtggtgcacccagggcagaagtgggtggagctgaagcccaggcaggatggttatttcgaggttgatgaaaaaaggtagccaagttcttgttcaacagtgaaactcgcctagcaagctcccactgaagtgggaaggagagggcaaagaaaagaggaagagaacaagaactacaacagcatggatcaaaagagacaaaggggtcattggtcccagaaactcagggcatcccctcccctcccctccccttcccttcccttcccttttctttctcccctcctttctttcttattttcttttggggggtggtggtggtagttttaagacagggtttcaccgtgtgtaaccttgactgtcctggaatttgcactggcctcgaattcacagagatctgcctgcctctgccgccctccaccccaatgctgggattaaaggtgtgagtcaccaccatcacccacctctccctaggccttctatagtaagtaggattgcaggtgtgtgtgccaccttgtttggtttctctgttgtattttattgctgggcatgtgtgggctattttaaaattgaggagaccgcttacccatgtaattctttggttctgttttgaggttgcgtgctcctttcctgtcctttcttgcattgggcatcacaccagggctttgcacctcgtgctggctaagcactttgcccccaaactgtactccagccgacagtaggggtttgctattgttccaagggacagcaagagcaagaggagctatggtggctagatgatgagaaggtgctcttgactcacaagcctgcctcacaaggcccctgagttccagcttagtagctgagatttgacaggcagatatgaaatgggcccaaagcactctcccaggtgctgcacatcagggaccagtgtgcacaggtcttgctaggccgagtgctgagctgcagcttgccctctgctctccttcctgaccccacggtctgcctgccactcttgcaccaaatcatattctgcagcaccgtttgtcttcacttggcacctgctctttttactgctccttcaaagcaaagagcaagccccagggctgaaagcttgccatttaccggaagattaatatcaaacttaaggagctgcatttagctcgtttgagacctgtagagctagagaactgtgtgtttaatatgtggcttgtgccaagtttaggaggtctgacctgtgatttgtacgaacatcttataaatcagtacaggcgtcccacacatccctgcaggctgtgctacagaaaaggcagcatgttgttctcttagcttgttcgtggttgcccttctagccgataccatctttcctgaatacttggactctctggagactaacacagttcctgactttagtgacccgccccttacataagctagggagaccaagcgagtgtcccctcatcctcatcccactttcccagtcctgtcctttgttctctttcaagggagttgcatttgtttcctcacttgcttcagcatctaatttatcagtagattagtaatacagggcaagaacagctctgactcagtttcaggttagttctgcatagtgaacacctttgacaactgcagactcctgagggaatccagccatgaaattgatactccaatgggaatgctccggatgttcaaggctctgagtatagcaagttcctataagttcctaggctccacagccaggagcccctgcatccggagttgcctgcatattccataatggatgtacatgcttatcagaggaaaatgtattattgttttgaaagatgtttgatttagaaaacaaaataactgagttacttagaggtatatattttcaattttgtttgaaatgtaaatttaagctgctataaagattatatgaaatgtcatttaacatacctttcaatcctggcagttactttatttcaaaatagtttattagaaaaaatattctatattttctgtattttgattgctaattataaatcatcaaaatatactgacaaaatattttaacatctactatttaatttaaaaattggaaggtatttttggaataccttgtccctacaaatagggcagattaaaagcatgaaggatggggtaggggtgctagggagatgattcggttggcagatgcttgctgtgcaagtctgaggaccaaaattcggatccttagcatccatataaatgccaggtgcagtggtgagtccctataatcccagtgctggatgcagagataggcaggttctgagaacctgcagccagccagtccagccagaaactaaagctccaggttcagtgagggactcaaaaagcaatgtggaaagcaacaagtgcatacctgcagtgccctctgtcctttatatggctgtgcactcgcacacatgtgcacgcacacatacaatcactagtagtaagaaagcatgcaaatcttaaaaacaaaactaacccaaagactgttgtctaacctgcactagtgcttatggtaagaaatgacatttgaacttgagcgaaactgatttggtgcatagaggagacaggatgctcagcagcagagccttgtctcagtctctgccatacttggatattaaccctgtcccgcttacaagtagtatgcaaatactttaaaagcagcatctccactttcaacttttgaaggcctgaggctccatctttgtctgtgatcacagcacaaacctgggtctgtatcgtaaatgcctggaaacataacagtagcagggtaagggtggccagggtccaggctctgctcttcctggacagccgggtgtacaggcagtcaaattccctcgactttgatatgcacgtcatgtgcacatcagagttgtcttccatggtgactgtgactccgtgcagctttatgttgtatgtaacactacattcccctgtttggccctttcattctctgctggctcttctctcccattgatgtgtcccagggcccgggtttggctctattctctccctctaaaggcgtggagagcctgcctttctgtttgaattcactccttggtagctcgttgcctcatgctttctgaccagctaccagattcctcgccagccttctcctcacctgatgtatgtctgctctggtctcctcagctcttccacttggatgtctcaactgcatgtcctgtgtccatgagcgctacctcagcagtagccctttgcctgcccgtgcttggctcacaggcttgccttgacctcttaattcaggtttctccttttacttttgtcccccttgccatttgccttttgtgttgttgttgggttgggttttgttgttgttgttgttgggtttgtttgtttgtttgtttgtttagcaagggtcttcctgtgcgatccaggcagttgttactaccttggcctctagtgttctgggatgttgtgtttgtttgtttgtttagcaagggtcttcctgtgcgatccaggcagttgttactaccttggcctccagtgttttgggatcatattgcacattcccatagctggctttgcagtctgtttttcttataacatctagattgacttaaacagtaaaaaatgcaaacagaacaagtataaatcctgtaatctgcttaaaactggttactagtccagtagccaacctatccatttgcccagagtaatgtcctaactgctcgcacagttatagatgttctttaaggtagacagaaaaggctagagaccagattccctgctgaaaacagatcttggtaagaaccatttctacttataggggtcaccaaatggtcagaccacattgccagctaagccagccatatattaaccaaaatgaaatattagagaggaatttgtttttttgggcaggtggtggtttctggtatgctggttggtttgttagcttgacacaagctagaataatctgggaagctggaatcttgattgaggtattaattgcctttattgggatgccataggcaaggttgtgggcattttcttgattactgattaatgtgtggtgtgggagggcccaacccactctgggcagtggtgacctaggcaggtggtcctgggtggtgtcagaaagcaaggcatggtgacacatgcctttaatcccagcacttaggaggaagaagcagacagattgatctctgtgagttcaaagctaatcttgttgagttttaatctagccagtgatacatagtgaaaccctgccccaaaggaaaggaagaaggaaagatgagggcagggtgtgaagaaaggaagaaggtaagatgagcaagccatgagggacaagtcagtaaacagcagttctccatggttcctgccctaacttcactcagccgtgggctgtgcttgggacgtgtaagcccaatgaatccttttctccccgacttgctttcagtgtttatcatagcagtagaaagcaaaccttgacacccagggattatccctagggcccgtgcatgctagccaagcactctgccattgtggtacattcccagctttctaaacagaaaaacaaaggttaagaacaaaagagcagaattctgctgcttcttggcttcatctgtggaagccaggccccatgaagcctggacaaggaaagtctactcatgtctgtctgtgggggcaagagacctccaaaactgttaaaggataacttttttaaaaatctgtaagtttgactcttacacatagtaccaaaaaaaaattgtgttttgttttgttttgttttgtttttttttttggaaaataacaacctattaattaagcaagggaaggaggcgtatttcataaccagaccctaagagaagtataggaagttagaagtgcacatggaataaagttacattgagtggagatgcacagaggcacagaggaagcttgtcagaagggaggggggacgactgaccaccagacagcttttggcattcgttttgggcagctcctggctacctgtgtcagatcccatcataccagagtcagacagtcttgatgctgtactgtatgaagaccaggggcctgtgacgaccagctacctgttttgtaaggtttctacagctaggacttaattccaaaggtctggtggtgattctgagtgtaggacagattggtttcatccttttcctggatgaaagccaagggtacggagcttttgctgtatgtttatcaacatttctgcaaaagttgctttgcatgtaaggaataattgctgctgtggtacatgtgtgaaaggccagacagggtctttgcttttcttcacgtatggacctgtgctattcactggagtttgtggaaattctgttgagtcccctgctggatgagccctgtgaagttgcttcagtgcaaggctcatcttgagcactgacttgatactccagagagctccctagatgagctatctattggcacagtaccatgtgctgaattgttgttactgtagtgtgcacgtaaattttggaaatgattgatgccattttcctttaaaaggctgattgaatctgagaactcttggatacagtaacaagtagttgtgttagaaatctctattttataggactagtagcaacatattcctttggtttgggggaagtagtgctataggccaaaaaagaaaaaggaaaaaaaaaaaaaaaaaaaccagccctatccccgagggactctgccagcaagcagaggatatacaagacagaacacaagcaagacaagtttctgctgaatgcctccttactacaggcatgttgggtgtgctttgaagggaggaggaagcttttgaagcccagaacagagagcaggaaggaatctttgaggtcggctaagccatcaccttgatttatagctgaggcatgggattatttgttcaaggtcagataaccgttcgttagcaaagctggagccagggtttctttccttactctgtctgtctcgcccaaggtaaggaaggagcttaggtttcggagtaggtagaactgagtgagtactggcctcaacactcactcgctgtcttctcaaacccgtttcctgatcagggggagagcggggatcccgccagagcatgtgcacaccgtgtgagcattttcagttagggcttgtcttttgctgctctccgggcacctgtcttggactaatcttgacctgggagagctttttcagcagagagtggtggcttcttctttccttcagctctgattgccaggtcccttcccttctgcatctaggacagagctagtgatgtgttgttcttgggagcttgtaggaacagccatgcagttctttctgtggtgctctgtggttgatgagcagcagccccaggacaaatactgtggtttccccacattttcacagtgacagcacattgggagggctctgggcatggctcatcactgggtgcgcaacacctgcttgtttagtgttgctccaactgagggaatgctccaaagggtttttaaggtttgatttggtttggttgtaggactggggatggatgctgggctcttatgcatgcccaggagcctgctacctctaagctgcagccccagtccttttcacacttcattttgagataaattcctactaagtgtccagtttagctctgcagtttagcaatcagtcttgctctgtggttcaggctgggcttaatctcaagattcttcctgcctcagtcagccaagtggctggcacaatagtgttgctggtctttgctactttataggttcttctttttctcaccctctatctcccctccccatttcacctcctatcactagataggagtgaaagaaggatatggggaagagagaaagatagagatctctgaatctaatttctattttcttgtttcttctttgcttgtagctggtctttgctactttgtgggttctttctttttcccaccctttattcccccccccccccgcccccaatccttggttttaccccctatcactggataggagagaaaggatagagagacatagtgagagagcaagtcatagctgctacaaagtagccttctatcctcactcctgggattaagagaaagcattcttactatatttctgtgttttgttttgttttgttttgttttaagaaaccaaaattctagagttcattacacataggtctgtgctcccagaattttctttgtgagacagggtcttactacacaccatagctctagagcctcctgcctccaccttcatcttccaagtgttgagagtacaaggcatatgctaccacattgcccatgacattttaagttaattttctgttccatttgattatattcaacttgaatttaaaacctgctgtctgtgtaagaatttaaaacaatgaaattgaagctaagaaacatataatgaccaaaatacaaaaaggagggaagtttataagatatagttagaaaatttagaatgggcaatgaagaccacatctataaaaaacaacagaagactttgttcagctaatgaagtccaagagcctttgagacacctgtgtacatgggatatatgacagaggggacagtgaggggttctcctgaaagtctttgtattcattgagaagtttttctggtagttatagattggtgaaatttagaagttcaggaattatcaggtataaccattctcagaaagcatgttttcatgatgtaaggaaaagtgagatcttaaaggcagtgtgtgtaaggtgaggcaacaccaacaaactggactaaagcagagatctgccatcattgagtgtgtaggaagagccctcgggtgtgaggacagacacatcgaagctgccagagctaagagaagtgggatttgagtgaaaacatggtgtactctgattaaattcagatttaaatttagagacaggtagtttgcagatgtcatcaaaggatgctgcttaatgttcacctacaggaagggtggagaaggaagctgggtctggtggggggggatttggaaggatgtggatattgcagatgctaacttaaggggggcgaatgtgaggctaatgagcaacacacttcaagtgaaggagttggaatccaagttctgaatgttttcactaacttcaactaacaaaaggaaaggagtggtcttcagatttcttgtttgtttctttgttgactaacccaagctcacagcatttcttcctaaatgaattgtatctgtaaatgagtttaagcgtgagcttgttctccagggcaatgctcttgtttggtactgttgttcatttatgtttatatctatgaagtgagaggaaacacacagtgttagatggcaaggtgtgctgttttcaactttccaaagaggaaatgagagcttcctattctaatctaaacactcttgggcagtaacagtatctgtgacatttttcttaacagaggaaaccctctccacttcccatcacaattattgggcaacaaaaatagcagacatacctaaggcattaaagtgtataaatcaggaagtaattttctgagcatcctgccacattttcaaacattgatttcagttctggttggtttaaaaatatgtaatttacatgtggaaatatttgctacacatatggcatatgtgacattatgttaatgtatcagatgattcctgttttttcttaagtgagcacatgtctaatgttctttcttgaaatgaatgacttcctgtctgacagtagtttgagtctggtgatgacccaagccttacctaccagctctattctcccatcttggggctttcctggctgatctctctgtcattcttctttggaaatgaatcctataagccagtttcctgtgagtgacgtcattcagatggcagcgggagagcacgtgtttgcaccgtggctggaactgcctgaggatgtcagactgaagtcaagacttagtctctttgattcatttccccaggagctgtattttcttttcttaaaaatagaaggcaaagggccagaaatgtagctgaaaggtggagatatttgggcttacacagagcaaagggagacagcaatcggatgtgtactgtctgtcttcctgttggctgtgctcccgaaaatctgacttctagtccccttaacacagaattatccccagtgagggagaagctgtgtgtggctttgcttttttatgtttatttatttgtttgtttgtttaaaatttatttatttaaaaatttaaaggcagagggtcttgctatgtaagctgactggcattgaactccctggccacttactttctttgacatcaggcctcagttgtgttgcctagggtgatctcaaactccagctctaaagcaatcctcctgtgtcagtttcctctgtatctgtgactagaggtacacacccagcttagtatgtttttaccttcttatggaacacagtggtattcttggctgggaatcaagtgacaggtcggaagtgaaggaaaggtcggcgtgcctgtctgttccttgcatgactgcccataaccatatgccatcattcacctgctcctcactacagtttctagacggctttctagctcacaacagaccagggagaagggcctgccttcctatcagtaatctgtacagggtggcatatctctacactgctgaagccacgctgacttaacatcatcagcctgagtctacaacttgcattagtggccactcaaggtgttgtgcattggtgaattttcacagatgactgtgccactatataccatgatggtgtcctatcaaaacctgttccagccgggcgtggtggcacatgcctttaatcccagcactcaggaggcagagacaggtgaatttctgagtttgaggccagcctggtctacagagtgagttccaggacagccagagctacacagagaaaccctgtctcgaaaatccaaatacaaaaacaaaacaaaataaaaaacctattcctccctctctcagccttgcaggcctcagtagatcctgacctcctatttgtcttataggcttgccttttttctagaatacacagctctatctatctactacatagtcatttcagactgacttttcctatagtaatctgattcaggttcccgtatcccttcttgcagcctacttactagattatttctatcttttatgtcaagactgactgtgtagatgtgcaacactttgttatacctgctgacaaattccttatttacccattgctgtgacaataggctagtcacattgtgtccatagtcagagagcagattggggtctgccctggtccttactatacccagggttacctgggatgtgaccaggatgcctaaaggactgagtttttcagttttgttccatcttaatttttctttaaatagccatatgtggctagcagtgacatgttggaatgttgcacggtgcatcttaaataccccagagtcagtcttagctgttaagtcatgtaacttagaccacttagcttcagtcttcataaatgacagctcaagtcagataaagtttttgtaaacctctcttaaagggtgctgtacattctgaaaggcccggatggacctgtgagagactgcttcagttccgtttcagaagtgggtttctcctcttacgttattggtatgcttccttccaccaggccactggtcctctttctttgctttggttgttaagcactgtggggctaaatctttgcttcacccagaacagctgcttcctaacagattgcatggttcttccctgcccaagagctctctccctctccgcttttcctcttccaccttcttctccaccttccttcccagcacccttctttctttttactctgagattatttatttatttttatgtaaagctttcttcacagccatgataatggttaggttttttgcatggtgcttggactctatcttgagacatcactaaaaaagattattaggacacacactcttcccttttcacagctttacacacacatttactatcttcagatccttgatatggtcagtgtgagagtctttgacctcagagagaaacgtgagcattgaagttggcattttatctgattgaatccagattggtggtttttgttttagtttggaggattttgtttgtttgttttccatttctcctttgactgcatttggggatgtaggaagtcttttgctgggtttgaaatgtctccttcaggatttcctagtccccatgcatgctcccctggaggtaacgaggcaagagagtttttgaccttcccaggatagcactgttaaaatgtacaactctgagaagatgtcgtaagccttcttactagtttcttctccctttgtttgtgtgctgtctccttccctgggtgttttgtttgtcacagcaccgttggctttgcttagacttgaggggtggttctgaaagcacagacagtgcgaagaagacttactagcacgccctttgccagcaggacgtcaggtagagcggaagcaactgctgtgctgacaaccaaggacagcagcctaagccatccgtgattcttggcagcctaaaacggcaaagcaagactcgcttccaggtgcttgatcaaagagagaactccattctccgctgtcgagtcggcctggtgcctctcatgtctgtggggcctgtgaggttgaatttagcacttaggaaggtataagaggaaaaggctttaagcataaaacatcactcagcatcttgttactgcagtctttgggcacaaaccctaggaaatactctggaattcaagtgcagtatgatagacatcaaattgtagtctgtagctgagatgcaaggccaggttccttgggaaagagtagatgggagaccttaaaaaaatgtgcttctcatttagccgacagaaaatgaaactgtggtaacattgctctacttgttttgttttgttttgtttcaatcaatgctgaaggaaaatgaaagctgaggagtttttaatgtcatttaatatgccatttgtggggctgcaggggtggcttggcaattaaaaaccacactgttcttccagagggcctgagtttgatttccagcacccatgcagcgcagtcatgaccacctgtaactcaacgctaggggctctgattctttcttcttgcctcgaaatgaatatgtcatctatatttttaaatgtaaaacaaacagatatgtttcatttttacttcatgagttgggtttaaactctctctcactcactctcgctctgtgtgtgtgtgtctgtctgtctgtctgtctgtctgtctgtctctgtctctctctctctctttctcttctcattttgttttttgagacaggggtctatttagtaggcagtcttctcaggtgtggggtgtggccttgacagtactcgggtctttctgacctctgtgactcagctttgcaggaatggcttcggcaagttggctcccagaaccaacttgttacctccaactcaatttaataccaaaatttggaaacaaatgaaaagatataaacattgataaaaatataagttccatgaagctgagcacctaatgcagaaattgtttccgtgataatcttggcacatgctccctaagactcctgccagaaatgttaactggatctcatgaagaactgtctgtatgatctcattatgaggagcatacttcaggacgggaacctggacaattcagctggccccagccccagagaatgtccccatctgaaagtcaggaatggtagagttgagtcttctagataagtgcatcatgtgatccttaattcaatgtttaaaaaacaactttgtcagaaactctgtcctttaaaggatataatctagtggcttctcatgtacccagaatcatgttgtcaccaccgtctcactctcaggtccttcacaccaaaaggaagctccctgcctgccgcctctctcctcatcccaccagccactgtagcgcttggggctgcttctgagcattgcatgtaagtggaatgctctgatagctgcttcggggtttccctgtgctcagggtccggctctgctccctttccctttgtacggagtggtaggtttagttcactctgtgtgtacagcacccctcccccattgtcagctgctgagcatctttatgactgcatgcaggtagctgtgcctaaggcaggttctgtccatccccagcacatacaaggtatttcttaccccgtgtgcccctctccccatgtgcccctcacctccatttttgttgttgaaagctagaaactttaaagataatgtggaaattatcgaactccgctccccacatgcagagtttgttgtttatgtagtaagacttctggactaactataaagtctgatttctttgttaaagagagccacagaaatctcggtttgccttgcttagtcgtcagttaatgactgaacagagtttctttaaatccctggaatcagcaagtctctcagcctgtatcagagtgatcttgtaaatgcaagtcagatcgtgtcaaccctgtgcctcggccctctgatggatggcctctgtttcactcagtacaagagatctgagcagcctgtaagatggccccttttgcctgtgctgggcaggtctttttgccgaccttacagttctgagtacgctgcctttgcagttggcagatgtgctccgcagtctctccctgttgggcctctgtccagtcacatttctcctcctgccttgcccacaatgcctgttcacagtagaatctgttcctcatggttcctggagggcttagctttactcactttctctacagtggaaggtgtctttgaatgatggtcttggttggataagggcatctttggcagtccattcttgcttagaaatgaggcagtggaggctgcctatagatcctctgtaagagtggagcaatgtgttcctgaggactctgtgtgaccatgaacaggggctgttcctgggttccctgtgtgagagtgagtgctgcctgggaatccctttgcaccttgtcttgtcccctggatgttttccttttgatcctttgagccactgtttccagacaccagtgcctcaggacctttggttttcttcagagactacttcctgggttcttcctgaggtgcaagcacagcagtgcccacttggcctctggtatttaagggaccgggacaaaggatctcaggacctgacatttggacagttgtcattttagccccacagcttgagtcatttccacctttgtcctttcagccccaaagccatgcagtgcagcttgggtttaccagagatctgtgtattctgtctccctagagatggtgggaattaggtgtccccagccctgtcacccccttcctcgtgccatgcctcctcctgtctgcccaggcgcaccgtgagggacggtctcagtcttcccgctcttgccgctggccttctgtctgtgcgcttgctgacgaggtgtgctccctgcgccactgtgcctcctctgtcctaaagtccttttcatacgtgtttactgtcattttaacaaggcttgggggtaggagctgctgttagtaactgacagctccttgtaattcttaatattggctttacttttgtatttaactgtttgcttgggatgtccagtcttccttggctcttaaatgtagacatgctgtctgctcatttgtactgtcagagccttgcgtagaccagctgacagggagagagcaccataaacagggtctgtcttatttagccttgtttttcctatttttagtatataaactatgtttctaaagatttatttatttaattaatctatatgtgtacactgtagctgtacatctggttgtgagccttcatctggttgttgagaattgaaatttttttttaggacctctgtttgctccagtcagcccactcgcttcagtcaacccctatcgctcagtccctgcttgctctgtcccaaagacttatttattattatacataagtacactgtggtccctgcttgctctgtcccaaagatgtatttattattatacataagtacactgtggctgtctttggacgtaccagaagagggtgtcaggtctcattatgggtggttgtgaaccaccatgtggttgctgggatttgaactcagaaccttcggaagagcagtcagtgctcttacttgctgagccatctctccatcccccaaaatatgtttctaaactaaatcaaaagtaaatcatggcagataatttttctccttttcaaaagtaaacactgctgaattatagctcatgcctatggtcccagcacttgaaagacagaggtagaaagatgagcagttcaaggccattctgaactcagtgagtcgagaccagcctgggctcagattgttccccaaaataaaataaagcataagcactgagattaaattgtagtaatgctaatctgagttttgggatcagaggacaaaaggctactgcagagcagtgcacctttggatgactcatagtactcaggctaatgcctgtaaacttggatgtgcaattaggcagctcattatgctgcaaatgcaattacatgctcaaagacagctcctccctttggctcacccagtctgtgatcgctcattataaagcctcagctgtcaaaattgggaaacacaagtggtgctggtgggtcttatagccaacatggaataagctatagaaggaaatctttatattataacttagctaagtttgatatttatttgctacaggaagcaatagtgtgtgtgtgtgtgtgtattctagtacagtaccatcatctctttcttacctgtaatttttatttttaaaaaactattgttttcttttttataactgacctgattccttaggactcaagttttacctggattgacattaatgaggctttcttatcttcattttgtcttgtcttaacgcagtgatatgaatatacgtgattctgttatagacattcttaatgtgtttaacaatgggacactaacccagatagcacctgacatttcatataacctacgttatatttactctattactattttttaagatgccaaatgttctgtgctgtaaagcctgggcccagttatttctgatgaaggtgatagcttcatggggagaatggcagtttactgtttggacctaggtttaagccccaggtgtctgactttatcccttcgagtggtcactgaggtcacaacagtgtgcacttggcctctggcattcaannnnnnnnnnnnnnnnnnnntggtggtgttttattgcttgaatcccaggaatttctgtctgtttttttttgtttttttttttttaatttctgtctgtttttaaaatgccctgaaaataattaaaataacttaatagttaacttgagtggctgccaagtgataggattattctatagtgacctcagtgaccacttgaagggataaagtcagactcctggggcttaaacctaggtccaaacagtaaactgcatcagcattgctgatagtcagcaactatagttctgttttttttttttttttttttttttttattggacttgcttacttatttgtgtattgtatatgtatgtggccacacacgtgttgtggtcagagaacaactttttacaccatgtgggtcccagggatagaacttaggctgccaggcttaggcagtgggcaccagactagacagtgggcgcctttaccacggccaattgagccatctcatcctctcaggacctggaatgtgttaagtgagttctctgagctacagctcctagctcagaaagcatggcatggctgatggaaagttaacaggtcatcagatgttaaaaaaaaaagtttttctcaagttataaaagcaaaacttagtaattagtgtgtctaaggaggattatctgacatgtaacattatgccttggaagacagcaagggactttgatacgttaatatgcagtcattgtaaatataacaaatcatgaccatggttttttcaacttactcattcgtaggtctgtgaggaaagccctagtgtggaggagtgcagagttaacacctttagtaagctccacttcctcacggtggctgtgaggtctgtctggaaaggaagtgggaaatgtgctcaataaagtcacaaataggtttaatcctggacttggtggaaaatttaatggccacaaatctgtttgtagagattatttatcataagtaggcctgtctcccgagaaacaaattaaaataattccatgaaaatccaggtaagtaatcaaaaggaaagtcacaagacattataaaagaagcctggggccctgtgaggtggctcagcaggtaaacgtgcctcccactaaacctcataacctgagtccctgtaacacacattgtgaggaagagggccattccctgacagttgtcctctgacctctgtaggacacccccccacatactaataaataaatgtaatagtaattttttttaaggaggctatggaaaactagatttgtatctggtctgacattgttattcctatcaccatccctaagagaaatcagagcatgaaatccacaaatccattcttggtccttcaagttcatgcctatagctgccttgatgctaagattccacctggcctcatctgtgtttccctcacctgcagccagtgggctacagattgaaaatacttgcaaaatatgatctacatactgagtatatacagacttagtgtcgtgtggcaaaactttctgggaagatacaacacacatctactcacccaagtgggtatcctataacaaactgaggtacgaataccaccaaagtccaacttggtgagccacgagttttattgggattacttacaggaaaagaaatgactcaaaagacggctgcatcaccaaagcccaccccagaaactcacaaaaactgggaacctagagcacagtacacagctggaggcagctcaacaggttgaagaatgtcttcctaggtgtctcagctcaagtggtctaaaccgcttctgggcagctggtctggtctcagtcttctttgcagcttgtctgagagtcttctttgtagctcattgtttaagagggactctcagcttctattgcttattctggtagggaaggcctagtgaatctggtcagtttcagggacttcctgaagctattttgagttgtagagcttctctgcagggtgaaatgtttcaatcctggagggaactgttatacaacacttgggatttgggcttttagattccagggctttgaaggtcactttgccctaagcaatatagtgtactagttctttacaaagcactagcttttaaaaaaacttgttttcgctcgcgcacgcacaagtgtgcgcacctctgcatgagttttaagtataccatgttcatgcaggagcagaagactggaagaaagttgggttccctagaactggaattacaggcaattgagagccatctgatgttaactgaatccaaatcctctgcaggagcctcaccccaacccccaaaatttaaaaaaaagaaaaaaaaagttacgtactttgtaaataatcaagagatggtgtttttcagtgatggggattaaacctaggcccacacatctgctcagccagtcttgcactgtgatttaaactacataggagaacttgtctcgtttacaaacagaagctgtgctgtttcatcagcacctgcacattttggtgtaggcatgagtctcagggattggtggtctcctggtgatacccagggcacagctctgtgttgttttgctgtcctatacatgacagtcccttgcattggagtcaaactacatctgatgttcacccaaaagtgatcttatagctgatagttttataagctacatagacatttttttatctgaataaggaaaagagaccatttggaaatagttttgccagagacactttaaactgtaatgtccatgtatgtaaagcctgtacatgcttcttaaaatttggaagactgtcctaggtgccatgatttcagcattagcaaaactgatgaaggtctcgagtcttgatatctgaggcctcgtgttgtagaaaagtagcagtgaagatggccttgctgggaaagcttttctccttcaggtttccaagggacctcgagctttctgacttgtcgctgtgtttatttcagctgaagtcactttggatttggttcattgcttttgtttcatgtgacgtgtgtgtgtacacttacatgcacacaccatccatgccttttctctaggtgtagtttcaactttaaagggatcatggccaagaagtactttatgtattgtaatgttgagtataggtgcctgttgattttaagctgctaccccacaattacctaaaaccacagcagttcctttaagagggtccttcatgaattttttttttaggtgccttacattttttttgaaagctaatctgtgtttgaaatcaaaccatttcacttatcatttaacatagcataaatagtagtactgggaaactgatctgtaaggctcctctatgacttgttttcatgtagcctcttgagtagtacattggctgcccctgcccccatcttccccctttgattgaagaggtgttaacacaggctattttcctttgctatgcctcttcctactatcttctcaaaaaaggttaaacttaatttcataactttcactatgatttggttgccctccaccccccataattactgctgaagtaaacaagtaggttatctttggaagttctgttgtgctgaccttgggttctcttgtctgtagtatcctctaggaatgagcaaatttcctttgaataagcactgacttcaatgggtgtggcacagtgcagagaaagatactgttaacaataaaaagctatccagaaatcgcaagctaaatgtatgttagagcatacttatgatactaaatatgtgttatagaattctagtactgttttgagtgagggacatgataaataaatggatagaagttactataagtatctgaattccttgtctctattttgatagttgtgatgtaacagcttagtacctttgtatctttcccctttccagcctaaattcttttactttgtttattccctttccattgtattctctgtcatgtttacacatattgtagctctttcctctggttgaatggaatacttgcaaccattgttaaagaattttggctgcaaagtgagtggtgtttgaccttttaatgtctcctcccaggttttgggtcctgctcccaggtggtgttccttcctggacaacttgacagaagagttagaagagaatccagagagcacagtgtatgatgattacaaatttgtcaccaagaaagaccttgaaaatttaggtaaaatgtgataaaatgtttatgaaattgtcttatttttacatttgtgggttttgaacattagaatcaactgagccatttttatctgatctttccaaatgtcccgtttctgccaaatcagatatcagagagttctaaccttataacctctgctcagaaaagctttggtaaaatcaattggctgaagcctttcatgctttaactgggagagactccttttcagcaaccgacatcctgtcctgagagtggtgtctctcggagtgatgggagtcaaatgtggctttgagagtgtgataaatgtaaataaatatgacaccttgaaactctctcagactgtaagcatatggttcttagatttattcataaaagacctaatccaaaatttgggattcaaaccttgaaatagaaaagactcttaatgcaggctggatattccagcctgaagtctgaagtgctccaaagttcagaactttttgaatcctgagttgccactcaaaagtttcagggttttgagtctggattttaaaattagggatatgcagctttccatcactgtagcaaatacctgacttagttttccaagagattttagatcaaggtgtgtagagtttgcagtctgtgactgagcgcacgcatggttttagacctgcagtggggcccagcactaacgagcaagaccctcagttccctaaagaccttcagatgacgtcattaacagatagtttatgttggctagttaatcagaccacatactctgaggaaatgttgggtactaagtccatgcagacacatgaatacattgtgcgttaactcctattgtaactaattgaagaacatcctaagattaatttttcccttctgttgttgtatgcatactactttaaactatgtgatctattttcagtataattttcaggtctaaatatggaagtcaatattgaacaatagcgaaatagcctgtggcctattgtctcattcacccaaaaaactgaggtagttcaaagcttgtctgggatgcttagtgagaccatatctcagaataagaagtaaaaggctggcaagaggtgtgtgtgtctcatggctagaaagcttacctaccaagcacaagactcttcttagttcaggtaccaccaaggaaggaaatgacttggtactataccaaagctgtaattcacacatggttcctttgaggataaattgtctcgtgacagccatggtgtgttttctctctctctccctctccctccttcctcttccctcaatatttgcacctaaataatttctagggaatggagagatggctcagcagttaagagcaccgactactcttacagagaacctgagctgggtttggagcacccacatcaggcagctcacagacacctattactcaagctacaggggatccaacaacttcttctggacaacataggcacctacactcacacatgtataaacacatacatgcataaaaacatgttttttaaaaagcaactttctgtgacatagcagagagttcatatgtgttccctaaatgtgtctacacttaatgtgttcctagtctaaattttttgatttattactacacgtgtgtgtgtgtgtgtgtgtgtgtgtgtgtgtgtgtgtgtgtgatgtgcttgtgtggcatgcatgtggacgacacactgacagctttatagagtcggttctgtccttctgcctttatgtgggttccagggatggaactcgggtcatcaggcttgcatggccaatgctttacctgttgatcctcttcctagctagcccttgtattcctactctaaatgtaatcattaggaaaagctacggaagagaagattcccgaacataaactgataatgacctccagttgtgtactggcagcaatgtagatgtttgtgatgctgaaactgtgagtgctatacaagtattccagctgacctgtacccccagccaggaatggtcctaatatgcatgagcatgtgtgtatgtgagttaagtttgtcagctgtttgtgcttggaggaccatgctatcacattgtcccttgtttctggaaatgttgacaacgctgccccagtttttgctttcaccattcctacctaacagtatatacctgggaaccaccttgggggtggcgacagggggagtggatctctatgagttggagtccacatagagagtcccaggacagccagggctacatacagagaccctgtctcaatgaacaaatgaacggtctgtttcaaaatctaagaccactactttaaggaaccctctttaccacagtcatagtaaaaaaaaaaaaaagacttttccgtcttttatacttaatatgacaaggggaatggtattaatggaattacttataaattcccatgaatattcaagattaacagtccttaattatgttactttaaagggaaaccgtatcataattaaaatgttgtttaagaaaagcttaaattgtaaagactggagagagctccatgattaaaagccctgtctgctcttctaggttcaattcccagcacccatgtggctgctcacaacttcctgtaactccagttgcaggggtccaccaccctcttcctgactccacaggcacggcctacatgtggtgcacagacagacatacagacaaaacacccatacacataaaataaccattaataaagaaggaaagaaaaacttttaatgtcttttaataaagacatcatagagatttatcctcttctgcttaactttggcagggctcacacatctcattggatcacctttcctccgagcatatatgcatgggtttttcatggatatcagactctaccacaaggtaagtactgctatggatatttcaggtgatagtaagccatccacagctgcttctacctacttttgccttcacaaagcatatgtctgcattgtgagggatctactttctttggtacaatagtcatggtatgtatatgctactaaatactgattctgattaatttcattttttgttttgaaaaggtgaaattgatggtcaatccatttgcttatgaagaatataggaaagataaaattcgacagaagatagaagaaacacgtgcacagagagtccaattaaaggtaaagatctactcagcattccgattaccgggggaaaatagttaatcttcattctgtgtgttactctgaagaagtctgctatcatatccatgaatttccatcttctagctcacatcttttgctttcttggtgtactttgtcatgagggtggttggttaggtgtttgggtaataatatgtacttgataacaaccaaaaggccaagacacactaggctatagtgttttgatctacagagctgctgtggaccacactgaaacacctgataacagttcccgctgctttcagtgtgacagatgttagcaatctgcttgtctccacctcctgcaagtgagcttggttttcaggctctctgcatcccaggatgcagagatgtagacagagttgggaaacagccagcaccagttgtattgatggagagaattagtgtctggaaggcatttgagctcccaaaagacagaaacactgaggtaggagaaaaggaatagtaacttagatccaggcggcaagaaaggtatgggcgcaggaggacccagactcctaagggactggcaggctggtggtcttggcatttgagggtgatcctaggtgtgttgagaactgcagacgggtgaataccactgctgccagaaccacctgctagccccctggtaaagaactgctgttggttatttcagccagaccatgagcagacagggtggagcttcctgtctgaatgttcctgccttcctggctctctggcgtcccatccattaagtcaaatcactgagtgataaaatctttataactgaacattggtttaaaatatggatgtaatttacacactctcacctacaaaaagactagtgactgagatgacctcagtgctcgttccattttccacagttattcagtttataacagcagtgattgtgagtatgcatgagttttagcagaagggggttgtgtgcctgccagagctacattttacttagtacagtaggtgagcatgatgtgagagaaggcagtaggtagcccaccacttatctgagagtccttacgctcccacctagactctaggaattcaccttttacagagcaggaagcatttcagaggttcccacaactgcagcagagagcagggcaggtggctgcaattgcaagggtcctaggccctctgtggccagctttctagggatctgggaaggcagtatgctcccattacaggccatgcttaccattctgtgccatttggcccacctgctgctcttccttgggtaattcttttcctaccatgggtggtcaactaagaagtatgggggacttttggtatagcattggaaatgtaaatgagctaaatacctaataaaaaatggaaaaaaaaaaaaaagaagtaggagtgagctgccctttgtgaacttacactactcacagacctgctgacctttaatgttacgtgtatttatctcagtgtctcttatttccatctctttaccagaaactgccaaaagttaacaaagaactggcacttaaattaattgaagaggaagaggagaaacaaaagtctacgctgaaaaagaaagttaaggtaagatgtcctaaggcacataaagtatcagtaagttgatttgcagtccatgggtagttatgtatacctttttattattggggtttccccaccctccatacttgctcagtatgagaagtttgaaaaattgaaaaaagttaaaagccaccgccacctcccacacctatagaagaaaagcattagtattgggccgattcctccgcatcagtcctcttaaaggtatacactgtattagcagtttcacatgttgctagattctctgtattttaagtggctatatattctgtgttaaaatttacttaatcctttgctgctaaattgctgttgattttttttctgtactgactaggtttattggctcataatttacttttatttgcatttattttatgctgaacttatttctgtgctcaggaacagtttacttcttttggtcaggatcatgtgcatatggccgggaaagctggcattagagttgacccactgtgagctttggatgttcggtggccatcggttagctcacagtgtggacagtgactagataatcattactctctgaacccagcactgtttgtatccccgacctgtgtccagccccactgtggcctgggcgcgcctcattctgcaccattatgtcgtggatcagtacacattgcttccttaaagtgatacctttcagacacatggtggcttttcagatacttacacccttaatggcctgggcagttttacggattttctgaaaatgaacatgaaaatttgagcttcttgattttcatgattttaaaggtcaagagtttttttaactgtagaagtaactgctttttgtttttgacatggcattatgggagggtatgtgcttccatgtagctgctacctgcctgccttttctgaggtaacagtagacagggagcagccataaaatactaaacgttagcacagtattagtattgtcccgagttgggaagatgtacctagtttttccacatttatgaagagtcaggagtcctcccctgtcctgtcccgtcatctgctgagagcagtgtagtatccactgcccccaaacccttgcccaccagaagagcatgcgggacctggagtcagggcctaaccttgtggccttgggccctgcaggctccttgtctggtagcttattctttgctctccaaccaggtatgtgaatgtaagctatagttgcatgagccctactgtgctctttggttcctctgccttcctcagaagccaggctcttatttggttcctcagctacactttcacctgtaacccagaaggacaggtaggggtcatcttactgctgtcacttctgtggtgttccgaccagaagctttactctgctgccttctctctcttctcttcggtagcctctcccaatagccttttatcctggtctactacattctttaagtaaattatttaaatctttggaagcccctttaaagtaaaatacatggatggttttatgtttccctgtcctctgcatgaataataaaccaatactgagcaagcttactcatttaaattcacatttttgtgctgtagctatgtacgccagtgtgtgactaagtgtgtataccctgagtgtgtgtgcctacagggtggaaatagtggcttcctgctttgctggcgtcctccccagagcattcacattggtcttgttagctgagtctgaggatgattagcctgtgactgttttagctttataatgtccttttacaagccgtgtggaagtgatcattgtatcatcttcctgaagctcctagaaaaagagagtggcgcagatttagactatagatgtgtgcatttcaggtaggccttgtgctcagagtccttgacacaaccatgctatagggtacttggactaaactcagtttcgctgttttgagcagcatggtgtatggcagagccttcttataggttgtgtgatgaagatgcagaagttggtgcattccctttgggagaccctgtgtgttggggaaagagtcttggtgtgtgttcgtgcactgaatggtcctgcagtcctcaggtgctgctacactggttttggagactctccctggtgcctgggattaggctcggctagatggccagtgagtcctgggttctgattttctctccctcctcagtgctgagattatagggacacactcccatacccagattttcaggttggttctggggacatatttaactaactgagccacccctttcagcccttcctctgggaggcttttgttgaggttggatggaggcggggtagtatggaatggtagaaatgacctggaaagctggaagcacacagcggtgttcattttagtgaagaattacattgctcctcccctgacggttttcccagaactttaggaactctctcctggtctagggaaatgaaaataggcaactgaagccttttaaatacactgttaattaaaacagtagaaaatatcctagtatttcactttttaacttattttgtaaaaactgtcaagaatattttgaacaatgcttgctattttctcttcccacactttcaatgtggacccagtgttttcctttgccctaataaattgttgcttttcaaagtttcatccaaggccctctttatatcattaactccaagagcacgttcatttctgcagtgctgggattaacccagggtcccatgtgtgccagaaaagctctttgccactcagccccattctagctgttctgagagttcctttaatatgacgggctttgctggtgtcattgcaagtgacatgtttaccttctgttactactgctttctaatttattttgagacatttgcttcacactgtttctcaaattgtatctattaagtcctaaccagtggcaatgtcccatttcccactcccagcttcttcctctgtacctcctttcctccctcctccccttcctccctctgctacattttcatctttttcttctttaattaccaactttgtgaagagcctttaacatgggatgcaaggtccagcaatgctgtgctcctgtgctgtgtaaactgctggccataggggcgcatcgctcactgagagcattgaaagacacgccatggtggctgctgctcgtgagcctgcctcctgttcacatcagagtgctgggagtttacacttcatgctgataccacagttgagtaacttcagaagtctgaaaattgaatcgtggtgttaaggacatgctggtgtttaacttaatctgtgggctctgactctctggatggtacttcaggcaagcatttactcttgcttccacctgttgtgtacttcataaccaagacagcatgcattcccttcagcatctatcttagggggatagttattgggttggtactgtttgctagattcagagaggacaaagcctatattcctctgtcaactgctgtgtcttcctggctctttataaccagttgtgtctttatagccacatcacctgatcaccagattcttctaggaagctttgttaataaaatggaccctgacttgctttttattgacttaatctaaatcaggtcctattattagagttccatcttactcctgaaatacagatatagtgtatggtcttttaaaaatctgttcttggagttgtataattcatcatctaatacttttatcttcaaaccaaattgtttgttcataaattaaagaaagctccccttatcaggaaggaagatttgaaagagttgcaaactacagcaggccatcagtttctcccatgagcaggacacgtcagatcctccgagtgtcactgctgcctcctgaccctaaggaagctctgccttgactgatcccagttactgttcccagttactgttcccactgataacgtcatggagtctaataagctgcatactctacacttgatgttgagtctacaacaggaagtgacctaccatgtagactaccatgcagacagaccatcagtgagcgctgtctggctgctgaaggaacttagaacttggtggtgttaattagattacctttcaacaaatgcaagttgagcttcccatatgctcaagcatctttgagatgtataggcgcctgtatcccatttggcttttaagagtccatccaagtgggtgggaccatttcccccacagcacgtgttctacatgccagccctttttactcagtttctctctgttgctgtggtctgtgttgagtgcgttgttcctgggttctgtgtgagagaggctgtctgtggactgggactagaaagccacagaagcagtgtcttcgtctcaggaatcagtaaatgacattaacactttatagtaaagtaataattcatcgctttggggaacaaatgtgattatgtgcaaacatactgagttagatcagatagttttaacattagaattttgtcatttaaagtttttttttttaattgcaaattacaattacagtgatatgaacactcaaaactcggtgttttcacaggggctcctgggatggttagatatcacacctctattcccttatcttccctccctgccttgcttgtgcttctgttgggacccactctcccctctttagctgcttattttggtataaaactctttcctgctgttgcctgtgatgctgcgtcttgacttttccttcctgctggagctagatagtaattttggtgaagtcaatattgggctttacaatgctgtaactatgtaaatgctctttgtagtcaagtcacctcacatgactttgatttcccctggagtaagtttctgtgtcgttatcaccaatcagccccttgttctatatcataagtctggaccttgtggcaagaatctgtgtaactcagatgaagaactcatttctaagtctttgtggattgagcaccttcaaatcctggggtctccctgaactgtttcatgtaatgttctctacgttggacaaagaattgaaagaactctgggtctttgaaggaatgcagtttctacccagatactttgcattcaccagatgagtgcccagtgagggctcatgggggtaaatacaagacacaagttctcacagcagcgtcacactgcaccctccagacagtgctgagagggcttactcctgaaataggagaggcactatcctggcaaagctctcgtgaccaccgtaccgtgctaggtgccttccaggctgtactctggcccagatggatcgctggctgcttgctgaaccactcagcctagaaacctaggtctttagtgtagagggaattctcttggaagaaaaaattattatttcctgccatgatcttgataatttgttcatagtgggggtggggacctagagagctgcatgaaaatacagaggaggggacaggctgagatatttgggggagtacccaccgtcagccctctgaggtttgtcacttgcaggctgggagagcacccgctgtgtgccagccaaccttcatttcctcctgttacttctcacttccctctcacaacccgcccagccccgctagacctcctcctctccctccttccttaggctagaggtgggactagagaatcagggttttaagtagcaggtagtctctgtatgtttctatattgggacaagataataataagtgtctgctcggagctacagaagtgattctttgaggtagtgctgaaggtggtattcacatgttttccaaacaccaaagcaagtgttgagcatgtgtatgtgtgtgtatttataagacagatcactagccagacacttgtaaactacttcaagaacatcactatcttattcttttttcttttaagacagctgtgaaaataagcaattagacaagcagaagtccttaggggaaatacctttacagctgggtcaaaggagtttttattttataatcgttcatctaacgcatacttgtctttaagcaggatagtttgtttgttgtaaactaacggggagaaaaatctttaaaataccaacaacatactctatttaacagtctctgttattttaaatataataattttggcaaatacatcaagatgttaattttttccttctttgttttttaacctaataggcacatggcttttgatgtgaaatattggttgattaccaatatcagctttctcacatttataagtgactccaaaatttacctggcagccccctcctctctcctgagtccttgttgtatgaattactgctcccaagacacctattggtgtcagtcagactgtggatgatgtctgtgacacacttagtcttaaatgaacatcatctcccgcccttcgctctagcctacactttttaccctgatgctctaatggtggctccaagctcatcattccagcgtctgcccacacagaccaagcagctaagagctgtttccaaccccatgcttcatctttagctctctcctctcatccagctgctgctgctctagttccatagaagtgtgtttcacagggattgctccctggctagagtcagtcccaccctttgatttccatcaccttagtgcaggccctgcctcttcatcacttcctaggatgcctctgaaccttataatggttctagtctctttcttagccctgtgccatgcaccatgcagctgccacctcttaaagcagtttgtcaccgtgtcctcctctctcctgactctttctctgaataatggctccccccaagtcttcgaagaacagtcagagtaattaaagtgtttatagtctgccttggttgtttttaatttttgtcttttaggatgtcttttccaaattgccagtctgctcttgccagataattcactactccttagtcagttgatatgctgtctttgtatttctttctttctttttttttttttttaattttatgtatgtgaacacgttgtagctgtatagatggttgtgagccttcatgtggttgttgggaatttaattctagtacctctgttccctcctgtcagccctgcttgctccaatcggctccattcgctcagtctctgctcgctctggcccaaagatttatttattactttatatataagtacactgtagctgtcttcagacgcaccagaagagggcgtcagatctcattacgggcagttgtaagccaccatgtggttgctgggtttgaactcaggacctttggaaaaacagtcagtgctcttagccactgagccatattgccagccccgtaccatatttctttttctttttttaattaaaaaaaaaattatactgtgtgtatatgagtgtaggcttgagtatgtgtgtacatgcacgcactcacacgcgcgcactcacacactatatatatatatatatatatatatatatatatatatatatatatacatacacacacacacacacacacacacgcatacaagtacccatagaagttggaagatgtggatcctctggaactggagttacagatggttagttgtgagctgcctagtgtaggaggtactgggaacagaacctagatctctgctagagtagtaagttcccttaactgctgatcatccagcccttcttttccaatttctacttgttgaaacctattcggttttaggtctcctcaatgccatgtccccaggatactctcttggctatatttctattaaattactttttttcctctgagaaccttcatacacctgaacatccttcatacattctgaatgccctttatactttctgaacatttttttcatacagaactttgtagcaaacactttgcggtttttttcttccctctgaaattggagtcagacactaggtcttttctttccttggtctattttagaaatgatatttactcaagggtgacttttgaacttgtatctcttggagttttagttaaggggttatagtttatagtttcatacaagtaataagggggccatacttggccgttgatttgctgtgtttttctgtagctctgctacacagatgcggcattcaggactgagttcagaagtggagcatcagccagttggtgaagcgagagccgtcacagtaggctggcgcttccagctcggttctaggctggcgctctgatttataatcattcctgggtgactggtttccactggcttccaggccctgagtgtgaaatgaccatcatctgagtcagtgagcaaatgtgtttgttatacacgtatcttagtcagggcttctattcctgcactaacaacatgaccaagaagcaagttggggaggaaagggtttattcagcttactctcccacactgctgttcatcaccaaaggaagtcaggactggaactcaagcaggtcagggagcaggagctgatgcagaggccatggagggatgttctttgctggcttacctcacctggcttgctcagcctgctctcttatagaaccaagactaccagcccagagatggcaccacccacaaggggcctttcctaataatccatggtccaaggaagaacaccaatggagttatccttataatgcatggaagtgttccagcttcatagttgggaatttcatagttcctgtgttggagacagtaaagtactactgccagctacaccaccacactgactgacagcttaaactccttccattgtggactgtgacattggaaagctttcatattttactttactatgatagctatactttagaagccatatcctatcctggtagtggtggcacacacctttagtcctcatacttgggaggcagaggctggaagatctcagtgagctagaggccagcctggtctacagagagttccaggaaagccagagctgcgacacagagaagccctgactcaaacaaacaaagccgtatcttaaaatttgaagaaaattctttcctatatagtaagcataatattaacgtaaaggttcatttttagatcattatgtataacagccaagaattatcaatcagctgttaaatttaccagtagaatttgttttgttgttggaaagtaaaacctagaatcaatcagaaagttctagaaattgtttctaaagaaattttgaacattttatgtcaatagtctataccttatggactaagtgttataaaaccattttctggtggtttgttttgtttttttaaattcagacactgactggtccctgtctctcttgcagagcctccctaatatcctcacggatgatcgatttaaagttatgtttgagaatccggacttccaggtggacgaggagagtgaagagttcaggcttctcaaccccctcgtctcgaggatcagtgagaagaggaagaagcagctgaggctcttggagcagcaggagctcaaggatgtaaggcttagctgtgctcagtcagctgctggtggctgctgctgcttgcttgtttgcctgctttaaagaccttttgttctgcggtatacatggccctgtgttgcataaggacactttgacacagtctactgtgtccccctcacccttctcctcctgttagtccttgttccaccgaacggtcgaacttcttctctcatgtcatacgtgcacacgattctgtgtgtgcacatgtgtattctatataaaatctaagagcctcaagtgaaggaaatcatgacatttcataaagacagatactgtgtgtttacagcttcttaacatacagtctctgattatacatgagaggtaattagttgtatactaattgcttgacattcagcctggaatgtatcttattaattaaaggcatttcttctgatgctccatggagcagctgtcatgtaatctgatgggctgatgtctctaatggtccatgtttggccaggggaagagctcttcctgctatttttgatttcaggaagaggaggaagaaccggaaggaaaacccagtgatgcagaaagttcagagagctcagatgatgagaaaggttgggttgaagaagtcaggaagcagcgcagactcctgcagcaggaagaaagagtgaagcggcaggagcaactgaaggaggaccagcagacagtcctgaagccccagttctacgagatcaaagctggcgaagagttcagaagcttcaaagagtctgccaccaagcagagactgatgaagtgagtagcctgtggagtccagccatgctccttcctctcaccttcctgtcctctcacacctgttctctctgggtggtgggtaccagaggagaggatgggggtgctccccaccccgcaacccagcaggaaagtcaccagtagaaagaaccactgggccctccctgccctttcaagtcttcatatattaacatatgttagaacacttaatctctgaaagcctcactcttgtcccgtgttttccattgggttgcccaagcctttaggtacttgctgtgtccacatcctgcgggtcagacagcatagcaaaggcctcttaacaaaagtgatgtttaattaatttgttggttttgagaaagttttgttaggaagcccaggatgcttcaagctccttctccttccttgcatcacgtttgaggcttacagagcctctggttaacacccagatcaagggctgggggattcaattttggtaaagtgtttgctgttccagtgtgagggcctgaatttgattcccagcacccatgcaaaagaactagatgcagttgttcatgcctggaacagactgatcctggaacttggccagtcagtctagccaaatctgcaaaaaccaagatcagtaggaaatcatgtctcaagaaaaaagaagaagctgggtgtagtggcatacacctttaatcccagcattcaggcagcaaaggcaggagaattacaagttcaaggccaacctagactcctaggaaatcccagggctgtacagaaagaccctgtctcaaaagtaatttattaattaattaatttttaaaaatggagagtaattgaaaaaggtactcaattttggccaccagcctctgcgtacatgtgcgcacacacacacacagacaaacatagcaaaccctacctagctcagttacctgattattggaaatttactcagaattttgcttgaaatattaagtcctttacaactgaatggagagatagaagatgagtagagtagtcaaatacagggagataggaaaagtggtggctgccagggccttagagacaggagagaggagcaccttttagtgggtgccgagcttcggtgggacgccaagcatgccctggagatgctgtgcagcatgtaatatgcgtgctgctcccaggctgtccacctcacatggtgtatatggctctgttctaaatgttcaccagcctgaaagagcatcagccctcagaaaagtggtactgttttgaactattttcagttgtcaagtatcaaagtgcatcttccctttgagactctgtaagcagagcattgagataacactggacactctgagtgatcttggagagaagagttgggatgcccttgggagcagctggttgggccagagacattcagcagagccaatactactgtgcctcttgagctttcttctccagcactcagttttccattcaggaacaggggtttttacaaagtccaggggaagaaaggtggggtggggaaggcatcagtgttgctgctggagttcaaacatgtcacacttctgtcgcttatctagcacagcgatggtgagctgctccttccccttagaaccaaggagcacatgtgttccagttaacaaaaggtgtgctataaagaagctagtggcagccgggcatggtggcgcatgcctttaatcccagcacttgggaggcagaggcaggcagatttctgagttcgaggccagtctggtctacaaagtgagttccaggacagccagggctacacagagaaaccctgtctcgaaaaaccaaaaaaaaaaaaaaaaaaagaagctagtgggagagggagagagagagagagagagagagagagagtgagtgtgtgtgtgtgtgtgtgtgtgtgtgtgtgatgagtagagttttttctgaggcagccatttggttagttttggttttttagagacaagagtcactctacagagagcccaagctggcttaaccatagctcaggctggaatgtgtttttacctacgtgagtggaattgcagtcatgttgccgctctgtccttagcctttagagaaactgctaaaatagctttgcagggtgggcacaccatagctgtgcaacttgctttgtccaggattactctcagaccactgctgcagactgcttttattgtttattttctgttgcatttgtcttgcttcgtgcgctcccagctagtgcttggaatggaatagacactggaaggacagcctgacagctgccccttcaggtcttctcaagaaaacctcatgtcctggtaaacgctggtaggaagcggcagtgattgcgttcagtgtagccataggagttaggccactttggggggtggaggatggctgagcttgagaacagtcttcctgtgggctggagctggatagtcacgtgacaaacaagcaggagaaaagtttgtagttaggggctaaagagatagctcagaagttaagagcatctgttggctttttggttttttgttgctttcaacaaagagggttcagttcccagcaccaacatggtggttcacaaacatctgaaacgccaattccaggggatctgatgccctcttctgacctccacagaaccaggcccgcacatgatacatatatatgaagatgaaacactcatatacataaaacacagttttaaaatacttttagggtttttaaaaattcttatttagtagagcagaagaaatggctccatggaagagagtgcttgctgttctttcaaaagagcctgagtttacttccagcactgacatcagaaggctcacagccatgtgtaagtccagctcccagagaacctgcctccctcttccagtttcactctcgtacagcacacactcatgcagattgttccggtaattttaaaaattttaagagtaaacatcaggtctagcaaggtgcctgaatgggtaaagacacttgctggcaacctaagtttggtcctagatccctcatagtggaatgaaagagctggctactagaggctgtctgactacccacaaatgctccttctctgcactaaataaacaaaatgcagtaaacaagaaataaacagcagctgagggaatccctgcagcgaagcacagtcggtgggaaaaacagtcgctatgagaagagctggggaggttacttagcttgcttcttaaagggctaacccagtggggctggctagcactggcaaaagcagtttaccgagtgctagtcttgactggattattgtggtaaatcctgggcttgcagattttaatacagcttagtaaagcattgaaccattatcctttagagacctgaaataactccttatgtttatcccatgagtcaccacaaggcagtccaggaaagacagcaacaaaaagggatgtattgtgtttaaatattcactcagacttgcccagcttggaaattatttttgtagcagagaaagtaaacagtcaatagtcagcaggttttagataaatacacatgtccatcaacacaaattttcatgctttacacgtagctaactgtgtttgtgagttatttacccacttatcagcttccccaccccctatccattcatcaagcatccaaggaatgcctggtatgaatgagctaagaccctcctagacgctgaggacaggaaggacacatggctgctactcctatcctagcagatatcctctgagtcagagaggtgtggaagggagaaaagaaagaaaggggcttgatttagggaaaactcaggaaaccgtttgtgagagtcctgttggaactggtcttttgaaaggtagagtgctgagcattcagtggggtgtggacaagtcccagcagacccctggaaagccatggaaaactgtccagctgagattaacatcatcggatctgtcctcagcagtccctccctcagtaacacaaacaccttgtgtaatgatactgcgtgttcatcggagaattaagtcatagaagcagaagaggccccttttcagaaacccatggtcaagtctctcagctttagaccaatggtatgaaagagactgtacttccaaggagccactcagactgtcaaagagagtctgagaagagatagagctgtcccccatacccagaaaggtccatgtgcctagaccctacccaaggccaggggcaagaggagcttacagactcagagccaggttattacccaaaaggctgtgtgaaggtaggggaggcagacaccaactctaacagtggctcctgatttaaaccccgaagcagaatggaaccgttgagggtagcactgaaatgtccagcatgttccctgtgaagtgaagcaaatctgacattcaaagcatagagctggaactgcagcttgtgttcataaggtgtcttcttggtggtgtcccagtggacacatggagccctaaggctgggcttgtggtatgtgttcatttgagagatgctagcccttttgtatgatgtgcaaggctacagaatactgaggacatgtttagtaagaaatagaatcccagggaaaacatgtttgttgagtcagataaatgccatacatctggttagttgagtgtgctgagagattgaaacatcacatttttgactgcttaattgatcaccctcactggagcttatgaagcaccacttgcaaactagcaatattgagagtatttgaaacttttataggaaaagcaaagttttgtcagttatttaaaagatgcacttatttagtgtgtatgtatatgtgcttacctgagtttatgtgcatgaagtatgtgcagataccctggagttttagacagatgtggtctctgatgtgtgctgggaatcagactgggtcctcggcaaggacagagatgttcttagccagtggccccagcactggtgatttaggagtacctagtgttaaaacgtgaaacactaaagcactgtttatattttatgtttggattccatttaccatgtaactagaatctgttctggggaacattgaggtccgttgccttctgctttttagcttgccttcccctgcagagggattaaaaaactggttgaagagtgattttttttttttaattaaatgttgctaattaaagaaattataacatatgtgtgtattttaagcctcaaagaagtaagtcgttctcctttcctggggcagctaataaataactcatttgattttttttttttattccccttgtagtttatgcccattttcttttttatattaaggtatccttattaatcgtttaggctcttccctttatgttctaccctggatagctgggtgtttcagcttctaatcttaattcctgtgtcttctctttgtaatcagcataatgtttttttaacttgtcctgcttatattttttttcctgaaatacgtaattgtaccaactagaaagtgtctgaagtgacctgaagcctgggctcggggggataaggagggcctgaagtaaaggaagccagcccatcccctacctgcctgcttccctgcatcctgtcccatgtgctgctgcactgtgtctgtcctgcatcttctctctgaccagtcacactcaagcagcagacgatgacctgccgggtagcagccacacactgatgttcaaagggaggggaggggagcttgctttaatgtagaagtctgcacaccatccgagctgtctctgatcttctgccatggctcgtcctaacactcagcttgcctctctgagcagcctagacagaacaagtttttacaggtacaggaggagagaacattgggagaaaggcagttatgtgccctagtgtggaggaagtcggggtgttcttaaagagtagtaatttcccacaattgacttgaaaagtcttttacttcccaaattaaggtgctctgtggcccactttgtctcggtggctccatagttcagaattcctgctaactttgaagctcgacgtttcgagctgtaaaaagagcagccgtgaccaggttgaggagtctgcctagatggacagcctgctgcaccagtcagctcgtgcctcacttttgagttttttaaaaaattgcaactagattttaattccttccagtttgtcatgtggaagcttgtcactgggaacacttgatggacatgtctcctgaagagatgtggataaatctgtggtctcacacacacctgaaaagcaaactccctcctggaaccctggctttagacttgatccacatacagcctggggcaagtcatttaacatttacctcccttttgccatctataaaggataaatacttctgtctcagggatgttgaaaggattaattagttagtctgtaaagaactttgaagatgaaaagtgctttaaaagtgcttcttaataacgtgatcgcctagaaaagagcgccacttttctgctaaccactcatgcctcagactatgaaacgaaggtgtgcttagcacgctacaggtagctataaagtgcagtgaacttctcatggtgtgaacatcaaaccttggctttaaaatctcaaaggaacttcattgtgtagtagctccctcaagagcagggatccacttgtaatcagtcacagagattattccaggggacaggatgcctctcacaaactgccctgctccttgttctatcaggttttttgtagggactttaagaggtcctcagtggggtctctcaagggaaggtgggagatggaatgagcttttattttatttttgtgcactcacttggtttgaaaaggaagaaagagaactgcaagggaaacagcactcttcctttctggttccctctgctgtgctctggagcaggcagactaggaaggctaaagcagattgcttagaattcaagaccagcttgcactataaagaaaaaagtctttgtcttagtatagatgcagcacgcgcacatacatacacacacacacacacacacacacacacacacatacacacacgcgctctctccccagcattggaagcacataaggatttttcagtataaagaagaaaattacagatcaaccaacagttacggagatagccattgtataaagaacctagaatagtttagaaaccctcatcaagaagtaaattgagattcaattctggaacagagtgtcaaaaccttaagataccagcagacatctcaatggaaagaaatcaggtagaatttgctcaatatgtaaattgtttctgttccctgtcagtgtgaacagaatttgtgttcggttgtccatgcagaagatggggattgactaaggttgatgaagaaaaactaaaggtgttagagaccccctgtgactggaaactcgacttgcacccagttccttgtaggaggtgaacaagggactgcatggccacccacctcgctggtttaaacatagagtgacctagaatcaccatcgctgcaaactaccccaggagaacacaggccagaaacattgctccttgcattttagctccagaattataatccagtgagctaagtggcagccattgaggttgaggtcctcaactattgaattagttagtgtttttgtcagccactgtttttacagtgtgcttatggaaaatgacagtttgagggcagctgactctgggctctgctagacaagggttactatttatcatgtgcatgaaagacttgttcatatgatcagtcctaattaaaccttattccaaatagtcaatcaaagcatgttaatgaatatgttgttcttttaacctcctacagcaaaactctggaagatcgtttgaaacttgaagcaaaacatgggacattgaatgtatcggacaccactgttggcagcaagcagttgacatttactctcaagagggtgagtagttccatgactttatttttaattcacacagaaaagctctaggtatgtgtatggctttgggacctctctcccaagctcttctcattgagaaagctgtgttccctactccagtgtttcctatagccagagccccagctgggtgacagctacagaaaaacagtcaagggggaaaagcctcatgctggaggcagccctgcttggtaacctatgttcctctgggtctctctggcccatcgtacaacctagctacacaagagctctgtctgagggaacaaggaaggggataaacacacccagtacttacctagaaaggactaccaagagacttgcccagataaagtcatttcccagggtgatttctcagtcagtgataatctgttttaaattgtcttgaagatgcttttccttctcccctcccctcctctcccnnnnnnnnnnnnnnnnnnnnnnnnnnnnnnnnnnnnnnnnnnnnnnnnnnnnnnnnnnnnnnnnnnnnnnnnnnnnnnnnnnnnnnnnnnnnnnnnnnnnnnnnnnnnnnnnnnnnnnnnnnnncccctcctctcctccctccctgcctccttttctctctctctctctctctctctctctctctctctctctctctctctctctctctcttttagatttttggcaaaggtggggtttctctgtgtgtatctctggctgtcctgtaactcactccgtagaccagactggcctcaaactgagagacccaccagcctctgcctcccaagagctgggattacaggtgtgcaccaccactgcccggcaaagatctatttcttatgcgcactgtagtgctaatgccttttgcacattgtgggagggactaagttgcttaagtatctgccattaactaacaactaaaatgacaggtgtcttttctcaaaaagataattttctctttctcagtcagattcctcaacaaagtcatcaagtacaaaaagggtgtctgcaaaagtgattgccattccctatggctgcttctctaaactgacatgccacttacgtgccataaaatccctcgaggttttctttttctcaatatacacaggaggagctctgtgtttcacacaagaacacacacttagcagtgtggttcttgcagtgttctaaaactctgtcagtctgtaatgtattcttttaaatagatcagaattttaagctaaaaccacttgatacattagcctttttctcctgaaatcaaatgagcagagtatgacttgtcaacacaaggcttattgtgtaacagggctttttgttagctttgttgtctgtaatctataaggggcaagtttgtgtcacctttgaaacaggatccatctctaggaacagatccacagtttctctgtgtggctctgcccgacagaccgcagggcagcactgctcctattccataatcatagcccttgtagccccggtgaggcaggcacaagcctgagccgtctgagctgctcactggtcagttctttccgtgaagttggaaaactcgacagaaaagggctactccctcatgctctcttttctttttctctcctaccgcttactagcggttccccaggccaatgcacatgcaggtaacactacagccaaactccatccccacactcaacaagccaatcagtgctttctagtatgttcagtagatctgtaaccgtcccactcgaagcttttgtctcagagctggggagatagctcagtgggaggatgctggtcacaggcctggctctggcagtgagaagacgcagtcatttccacgccacagaactttcaagtcagaatgcacaaagttgaatgccattttgtaaatttgtagtaaaatgaaaagatggggagataccctgagacttgcttgaagtgacatcagagctgaatcaactgtaggcttcagaaccctttgggagaatatgctatgtcaattaatgcttgatttatgagttttattacttgattggcatgctcttaactatttagtatatcactgttaaatatatatttagaaacatgtttgtgtatttgtttatagacgtttccctttgctctatgtttattgtatatgatacactgaggcaaaatcgtggagttgcccaggatgtctgtaggtgctttctacagtgccagtagaattcacagggagaatgtgtgtatgtctccacagctagcgtctgtcctctcccctgccccacgagggctgtaggctgcagctgcacaggaacaaggagaaagaggaaagctgacttggaaaagagctaattgccctgtaaatcttgatgagtgggtgacacagtggcatggtctcccagcgcagccttggggagagaggctaatgatagaccttgtgtgtggggagctttgtccacagaacaatagaggcctcttcccagctcctctggcagctcttggcctggagaaggctgagaagctgtccagagctgcccacagtcctgcttcatactgtaacaacaggcccacactccaaaaatccttagagctcccagcatcctgtctatctggattcagcacatctaaagacatgcattttagctgggcagtggtggcacatgcctttaatcccaacacttgggaggcagagacaggtggatttctgagtttgaggccagcctggtctacagagtgagttccagaatagccagggctacacagagaaaccctgtcttgaaaaacaaaacaaacaaaaaacaagacatgcgttttagaagccagacctggtagtgcatacccacaaccctaatctgctcttggggctgaagcaggaagatgatgagtgtgaaggtagtctagcgatgcagacactgtggagggtggggaggattaaggggaacttattaatatgtagggcagaatatgcttccccctcttctgcccctgccccccccaaagttctcactgaaacaaacgcagagccttattcatcagaattaaatagttgtgctaactctgtgagggtcttgatgatgtgcagtttagtctccagggcagtgtagtcccgaggttccagagtctccctgttaacacaggaaaccagtgcagtgctctgactggctgcgaggctcagcccattctctctgctaaggaaatagggcaaatgacacttttaccaaattagcccaaagtaagtgctctggtggaggaagtgcctgtgagctcatggcaaagagtctaagcagtgtgttaggaagcagaggcctgacatacagtattttctatatatttgtgtgtgtccgtgcatgggtgccatgtcatgcatgtggaggtcagagggcaacttgagttagttatttctctcttctaccatttggcccccccaggtgatcaatttcagatcaccaggcttggtggcagataccttcacctactgagccacctcaccagcctgacgtaatgttgaccataggagtgaaccaggaagatgtggttacatctccatcccctactccacccagtgagaaagggacccttgaattgcagagggaggctgccacctgaattggaagggcatactgggcagggtttattttgaaaatgcacaggatatattggtcatcagaaatgaacctggagtaatataggaacccaagctaccagaatgcagagatgggccctttgtgggctcaccatatcgtcccacaccctctctttaaactcagatggttttttcaagagggaaacactggtgaatatctatctgcattttatccaagtgtgctaaagctccaagtgccaacagcaagtattggtatggatttcagactccttagctcctctattcagtaggttctgcactgattgtctgctgagagtgggggtgccactggaaagaaagtgggatctgggagcattgccacctctcaagcaaatgaagatagaaaactcatgtggagaccatccctgccagactgccaggggtcaataatagcaagtctgttcttcccctccttcccttcctctcccctctttctctctccctccctagcatccaaaagctctttggagccagccctaatgagttatctaatcaggtgtaggtcataatgcactttaatatgtgtgtgataaaaaacacgtttgatatgcatttgataaaatgcaacattttttgtttgtctttaagtctgtgaatgaattcagagtttcagtgtgcaagcagaagtaggcatgagtcctcttagagcatcccggtgtgcggacacttcccggtgtgtggacagacacttcccggtgtgtggacagacacttcccggtgtgtgtgttctttttgcccagggattcagaatttctcctttcacagtgaaaattgttctttgtccaactcctgccgccaccaggacgtgatgctgagctgcacagtgttggtcgcaggactgtgtgtctggcagcctttgctcctccctgagggttatagcagaccctttcctctactcacctcactttcttttagtctgaacagcaaaagaagcaacaggaggctgaaaaactgcatcgtcaggaaaggaaaaagctgcgcaggtcggccagccacctgaggtccagacccagaagaggccggccctttcactgaccaaagaaatgtgcccacgagcaactagacgctgtgcttctccccatggattctcacaagggcatcacacccaggctccgtgtagatgtgtgtgcatggtgctggtggtctgactggcccactacccacctggagaagtccctggccctgggtgctttttccaagtggctgcccctttctcttccccctccccctcccgcccttaaatcttgtcttctcccctgctgatgatcaggcatcatttcagatattggaaaggcctccatgaagtgaaaagttcaccctactggaaacgggacattatcatgctgtaagaatggcttgggttagcccagccgtggtggcgcacgcctttgatcccaacacttgggaggcagaggcaggcggatttcctgagttcgagaacagcctggtctacagagtgagttcccaggacagccagagctacacagagaaacnnnnnnnnnnnnnnnnnnnncaggacagccagagctacacagagaaaccctgtctgccccccccccccccccaaaaaaaaaaaagaatggtttggggttttttgttttgtttttttgtcatttgtttatttgagacttgagtcagggtttctccgtgtagctctgggtgttctggaattcaatctgtgccttgaactcatagagatccacttgcctctgcctcctgagtgctgaagttaaagggatgcaccaccaggcccagccagagtgtctgtccccactgtcttctgcccctcaggactgagtcacctgatgactgctgagtggccctgtttatgtgcatgagtatggtatgttggcaggctgactggcttgcttatattcctttgtatagtttttaagctatttttatatcaagggtataaattaataaataataagtgaacgctactggctatttgtttagcttatcacaaaattacgtagttattttctgatgaagtactatttgatacaggcagcgcctataaaaggagatgcttttctttggacattttctctgaggaagactcctgcctgtggaaatgtaaaattcactttagcttccatactttggagtttctcatgtaaacaaatagaatgggagctcgttaggctgtacctatggtgagtccacaaggcagaacacattagttagcagtcagtgttgttggacccttgtctctttagcctgtgatgtgtactcaagaactttctgactgttggtacatgaatctgcacatgcgcatgcacgcacccacgcgcacacacactcctacctctttattaactattaagcagatccctcctggggctgtgagcccctggtgccctctcttccctttctcaaagtttcccattttaaaattgttgtgcatgctggtatcccactctgtcatttttcagtgtttatatcagttgcttttgtacagctatcaccaaaataatcaatatggacttaagggattcatcttggctcttagtttcagagggtgtcagggtgtgcagatgcctttcacatcactacaggccaggaaatagaaacccagacatggccttaaaggacttgtctgagcaacctgtggttgacctctgccagctagcctccacctcaaagaacatccccacacatcctaactactatctggggacagatgtttaagttagaggcctgtgggagacatttcaggctcaaaccctaacctgtgattgttcgttaccagcactaggatgtggctttgtccagtcctgccagcagctgtccttcccggtgagacttaggagctagtgtgagaagtgtagcaccaaagctgggcaccaggccctggaggactggggttcctgagtgatgtgtgctcttctgctccagatccctctcaaagctttagtatcccaatcccaatgcctaaatcttctgtttcaagtattttcatcagtaacctttgaaggaagcaggcatgctgggaggggcaggattaacacagggcagacagcagaaaatacaggcccaggggtgcgggacttagaagggcttctgggaagaagattgagttcagatcctttcctcagaatcctcccctggttctcttctcatccagtaacatcctgagtccctgaaggaccctgcctggcacagactcctttgtttgctgtcaccacactgaccttcctctttctagaacattccgggcattccctcagctccccacgctcccccaggcctctcaagttactttctctcctgtctggtcaattctgccccatttacattgtcacatcccagtgtcagcatgtgtttacaaatggtactccatttaatatgctttcaaaacatcaccacggggaccacagagtcttcttgagtggaagaagaaaaccaaatacggtaaatcatatctgacctatacatgagtatacatgctcatatactcatgcacacacatgtgcacacacacaaataagtatagcataaatttagaaccttactatggaaagtgtcgggtacacacaagaatggatggggaacagtcgagtagaccagcatgccccagcagtgtgcaacgtgctcacggtgagttctcagctagcttgtccagtgtcagctcctgtttccagaatgccaactcaatgaggactagggggaatgttttaatcagtatgttttgtttgtggctgtgtatctaatctctcgaacaatgcctaccacatcatgcaatgtttatttaagccgttatggggtgcccaccagagaaaaccactcagacgtagtccatagctgaacgaaagtgttttcccagccaatggtgactgcactcaggtctttgaggcccagtacagcaccaagcttttagcataaggggtttttaaggcaaaaccacatcctggtatctcacttggcagctgcagggagagagctgtacaagcaagcagtgtaacagaagtcaaggtaaattagctggagcatcttgacctcttagagttggtaattatttcccacaggattctccatggaggagagcaaattctagttaaacctaaagtggcctcagcaagaagacaagctagaggaacgctgtgttctcctgccctgtcacaaatgactgagtgggatggaattgaacattcaactttctactttttttttaattaggtattttcctcatttacatttccaatgctatcccaaaagtcccccataccctccccccacccccctacccacccactcccactttttggccctggcgttcccctgtactggggcatagaaagtttgcaagtccaatgggcctctctttccagtgatggccaactaggccatcttttgatacatatgcagctagagtcaagagctctggggtactggttagttcataatgttgttccacctatagggttgcagatctctttagctccttgggtgctttctctagctcctccattgggggccctgtgatccgtccaatagctgactgtgagcatccacttaggtgtttgccaggcaccagcatagcctcacaagagacagctatatcagggtcctagcagcacaatcttgctagtgtatgcaatggtgtcagcgtttggaggctgattatgggatggatccctggatatggcagtctctagatggtccatccttttgtctcagctccaaactttgtctctgtaactccttccatgggtgttttgttcccaattctaagaaggggcaaagtgtccacactttggtcttcgttcttcttgagtttcatgtgttttgcaaattgtaacttatatcttgggtattctaagtttctgggctaatatccacttatcagttcaactttctacttaatgtcagactttaacctttatgcctgaggagtgattcccacctgagctttcagaaatgggatgcaaaaagatgaaattgcaaaggttgacagagggacagggaaaaggaagttgaaaatatacattatgaataaataacccttaggggaaagtttagcataaggaaacagaaatggaacttatgtggtcaagagggcatgagagaagggacagtgtgtgggtgagggactggctggtgagatgtctcaataggtgaaggtgcttgctaacaagcctgatgacctgggttcaggctctgaaatccacatgggagaaagaattgactcccgtaagatgtatttgagtgtgtgtgtgtgtgtgtgtgtgtgtctgtctgtctgtgtgtgcttccacgtgtgcacacaactcaagtaaatgttttagtaaaaactttttgtaaagaagaaaacatggcattagagaagttggttcctgatctgtgtctgtaaatggatggcgtgccgcatactttgcagtcaactaaacaccactagggtcattttcaaagagaacctcagttgagaaagtgtccagcagtgcccagtgagtgggcttccatagaggcttggcagcctggaatgggagttgcaggaaggtggaggcctgctgtgctcctgggcttcctgactagtgagatgccccaacacctcctgccccaacacacacacatcagatggaagaggaagttctcatcctttgatgatccttgctcccagcccaacccaataggacttcaaagctgacaggtgggaaggagtccagctatatacttgaagtaaccttgagtttcttttagacgtaggccagaatgatgcatcctagacttgggagttgagggggtttcgagtccagctggccggaacacctccccagttggatttccccatccggcctccctcagttcactgcccagtttctgctcacacacctggttgacccgggggcagctttctcttcctctaacccttcttgagttctgcaaaatgggtggaatgttggaatctctcctcctcagggccccactctgctcctctgttggagctccactgtgtccctccagtcttgccaagcttcccttgcctggtctgtggttgcctcttaatgaaacttttccttctggacttagtgctacacccccctacacacacacacccatcccccattccctttcacactgcacttaggctctgaggtccttccccagctcctcttctcccctccccctccccctcctctgtattatggtcctctggtccctcatactcagaataaaattcatcactgccccccctccttccctgccccgccccatgttatctttatttcctcctcaggcccaacagcaaagccatgatttgttcagttgattcactgaccgctccttgcaagtaactaaacagatggatgccctgctctggtgcagtttctgtcttcaccggaaagcagaagagtcacaagaatacaagcaatatagacaagcagtggtgtcagcatcgggaatagggacttagggatccagcataggcaggaggatccttaagttcaaagccagcctgttctacaaagtgagttccaggacagccagaactatacagagaaaccaaatgaagcaaacaacaaaaaagtttagggctggtgaggtgagataactcaggtggttaagaacacttgctcttggaggagctagagaaattacccaaggagctaaagggaactgcaaccctataggtggaacaacaatatgaactaaccagtacccgggagctcttgtctttagctgcatatgtatcaaaagatggcctagtcggccattactgcaaagagaggcccattggacttgcaaactttatatgccccagtacaggggaacgccagggccaaaaaggttgagtgggtgggtaggggatggggggtgggtatgggggacctttgggatagcattgaaaatgtaaacgaaaatacctaataaaaaaataaaattaaattaaaaaaaaaaaaaagaaaggaggaggaggaagacatgacaggcaatacaatgagtagtgtggaataaggctgaatgaaatcggaatcgaccccagggcatacagcagatgccccaggaagacctgtaaaacagttctgaagccgtagagccttacccaggaatcccagagctccagcacagactcaaagggcaactttgctgtggtgctcagggaggacagagccttggccagtgtgactggcacaggacagaggacttagactagaacaggaatggcttgatgtcagcattgtgggccctaggacatcagaatggctgatgctccagtcttaggtcatgtcacccttacaggtgggtgtgccctctgcagatcttcccatttctgtggtcccatggccacaagccctgctcgccgtttttcctctgtaccacatcagtgtttgtacatagatggcagagtcagggatccccagaccaggctgtgagaaactaatcctttaatgatggagggccttccaaagctaacatggagtctgtcagaaaagacaacagaggaaacaagaggagacctgggtctcgtctagacttgctcaaggctaagttgccagttagtggcacagccacttaagactgctattccttggtgtgtgcatctgtaaagtgggtttaatagtatctgtcccctgaagacttcagagagtgtttgtggagcttaatgagtgaggtccattaaagccctcaaaagaaaggtggagctaaatacaaagcagtattgtaattaccctgcatgttctctgagccaggtcacatcttgttttaagagggttaccatgacgatgggtttgctttaaaaacttgagtttcaaaggcatagctgtaagtctccagtaaggagtgaatttcatttcattactttttgtcatggggtgggacagaatctcacagctatttagggactgtcatggtgtgacagctactgttgctgctgagtggcaaagaccttgcttgttacccgtcctgagcacctggcgagtcttaatgaaggttattccgtcagtaaatccccagcacacccaacatgccacaggcaggctgagggtggctgttggctgcgtgggggtgacacatgttttgctagaaacagaatttgctagaaagttgttacctggagttctgagaagctgaggaccctccatggtctgcagttggcaagctgagatccaggacagctaatcatgatagacgctgcagttcactggtcacagttgcagacctatgaagagctgatgttttagacccactctgcctacaaaaagggccagtgctgtcccagctggagggcattcagcaactcccctcaatccactcaggccctcaatgggttgggtgagagggagccacaggtcatagacatctctatccagtgtgtggacggggccctgtcaagctgacatagacttcctatcacactgacgtgtgccaaatccagtaacatgacaggcctggagctaaatggtttccatgccatcttgtccgatgctactcattgatctgaggctaagttctttcctgtctggacccccatgtcctcacctgtaggatgggactaggaactgtatccacctcacaagtcaccctcagtcaaggtgtcaacagcaagccagctcaccacccttgtgtgtcacaggaggtccagacctttgcccaaggcccgtttctcctccacaaatcaagacccacaggcccctctaagaccctattggattatctctgcagtagtcacctaagggtctgggtcacctaaggccagatgagttgccctgccttctcgaatactgcaacagcatccctactgtcactgctgtggtgactacggtaacagagactgggatggaggagggtggagcagtgagcacacagctggtgggtctgaactgaggtaggtggcccagcagcctgcacagttggtgttaatggaatgtgggtgtatggaaatcagagactggaggtgtggctcaactctgtttgatttctaatatctaaatatactaaaataaaatgaaagtaaggaatttagggaaattttggccagtcaaaagcagctggtgtgagtttggtggacagttaccacccgtcaggtaccacacccgtcagtggtggcagttaagagtcctcccagcctacccctaagagtcctcccagcttatccctgtgttttaggccaagactgaaaatatgtgagagcaaacaaactctaggtgtcatttgccttctctgagcattgttttcctcgaatcaaacctgaagtgacagtcctacatcacagggtatctggcgagtggcctgcttatcctgagcagcaagatgtcagcccccttctccaccttccctcaggacccaggggagagtgtcacgcagtaagttcttcctctactgaggctcatagaacctgtctgtggatcagtgagcatttggccctgaggagcctgccctctggcttcagcagttaccagcgcagtgtttcggtgtgtcagtgaagaaggtttgggaaccagctgtaagactcaggaatcaacactgaatttagaaatgaaatttcagattagagaacagccctctgagccgggcggtggtggctcacacctttaatcccagcacttggggggcagagacaggcggatttctgagttcgaggccagcctggtctacagagtgagttccaggacagccaaggctacacagaggaaaccctatctaaaaaacaaacaaacaaaagagagagagagagagagagagagagagagagagaggagaagagagagagagcagccctcttaattagtgacactgatgaggatggtgaggtcaggatcagagataagcaagggctgctcctgcccacgcagctcctggtgtggtgtgtagtgagattttcttaccttgttgctatggaatcgattctgtgtacctgaacttaatggggcctcatagagtcctcccaagcctcaaaagctagagccttgaccaaaagccagtctggagcactcactataagtggagtactcaccacagcagagcactcaccacagcagagcactcatcacaaacagagcactcatcacaagcagagtactcaactacagcagagcactcaccacaagaggagcactcatcacagagcactcatcacaagcagagtactcaaccacagcagagcactcaccacaagaggagcactcatcacagagcactcatcacaagcagagtactcaaccacagcagagcactcaccacaagaggagcactcatcacaaacagagcactcatcacaagcagagtactcaaccacagcagagcactcaccacaagaggagcactcatcacaaacagagcactcatcacaagcagagtgctcaccacaagcaggtttgctgctctgagctcacgaagcacccagagagactgcttaccgtgactggaggactatgcagccagtagaggggcttgggctcatgtgtgtgggacttggccacatctgctatgctcactgaaaggacggagagcgccccagtatgtctgtgcctacagcactccaagggacacagatctgtgggtaaatgtccccactgcaccttgggaagatctaagtgacacaaagtgttggagattcagaaactcaggcttcacaggtaaaagagagagacagagtagatagagctggagcccagttggctgagatgctgcctggcacgtctgtgaggtggctgaattccaatgggggacaaagaaataattggcagataaatggcaaagccggggtttaaaagcagtgaggctaattggcaagtcctggggaccggacagagcaatggcaataaagccccttgtgtggttaggacctacagaggaagtatacttcagagagaactggctgaggccagctcagaacactgaggctccctaacagaacgtcctgcagaggggagaaatagaagcagaagcaggaggcctggcctgggtgggacttcactggggaggtcagatgtggggagagccccctttattggggcactagctggtgaagagtctcaagcctggattgttccagtcctgtgagcttctcagcatgaagggaatgagagcaagacactttttgaagagtcactgaagacatttctgctgaaaaattgtgatttcccctcaggggttggctttacaagtgaagagccattgcctttaatgtaactaagcagagctccctgttaaaagaggtaaggagagaggcagggaatgtgtgtaccatgagactgctatggcttgcacccacatctcctctgagtgcccacagcctgggagttctcagggcacattcagtgcatagggcaccatcctagagtggtccaccccaccccaaccctactctttaacatcttagctccgctcttgacaggcctagctcttgacttaaccctcactttagccacccccagcaatggcaggttcccagaagaacactgagtgcttgactcctggccaggtgatactaggtgaccacggtgataatgggcaaaggccaggagcagaacatgtatgtccccttcctggggagcggaagccatcaacctgcctgagttaggtgagggctaccaactattcaggcaagggttcccagtaaccatggcgatcccattggaaacgctgccatgccatcctgtgccctcacccgcagaaccccaaggaccgtgatgaccacacacactctagggcaatgagcaggtttataccagggtttgcatttaactgaggggacagaggtagcagtggggtatatcggaggagaagagatgggatgcccatctggatattattcttatccttcctgccagggccccagtcaggcacatgacatcggtggacttggaaatattgatagagaatggagctgaggaagtgggacagtgagaacgttccacagggcttggggcagaagctgttgctcctggtaggccttcagagctaaagggaaaagaaagaggaggctgaagccc

SEQ ID NO: 1697 - DNA, 3067 bp, Mus musculus
ttcccgcacattgtgccggttcgcctcgggtttggatgctggggtattcgggtgggtcggcgttctgtgactgcgtgccgggctccggctgctccgcgctgcgatgcaggtctccagcctcaacgaagtgaagatttacagcctcagctgcggcaagtctcttcccgagtagctgtgcctgtccggcatgccctgtgctccttctctgatgctcgtgtggaacaagtttccatctctcccccttccctcttggcagatgttcgtaggagaattgaacttattcaggacttcgaaatgcctactgtgtgtactactatcaaggtgtcaaaagatggacagtatattttagcaactggaacatataagcctcgggtccggtgttatgacacatatcagttatccctgaagtttgaaaggtgcttggattctgaagttgtcacctttgagattttatcagatgactattcaaagattgtcttcttacataatgacagatatattgaatttcactcacaatcaggcttttactacaaaaccagaattcccaagttcggccgagacttctcttaccactatccatcctgtgacttgtactttgtaggtgcaagctctgaagtttatagattaaacttagaacaagggcggtacctgaatcctctccagacggacgccgcggagaacaatgtttgtgacataaatgcagtgcatggcttgttcgccacaggaacaatagagggtcgagtggaatgctgggatccaagagtaagaaaaagggttggcgtgttagactgtgcattaaatagtgtcacagcagattcagagataaacagcttacccaccatctctgcattgaagtttaatggagccttgagcatggcagttggaacatccacagggcaggtgttgttatatgatcttcgctcggataagccgttgctagttaaggatcaccagtatgggctgccaattaagtcagttcatttccaggattccctagatttggttttgtctgcagactctagaattgtcaaaatgtggaacaaggactccgggaaaatatttacttcgttggagccagaacatgatcttaatgatgtttgcctctatcccagctcaggaatgcttcttactgccaatgaatcccccaagatgggcatttactacattccggttttgggtcctgctcccaggtggtgttccttcctggacaacttgacagaagagttagaagagaatccagagagcacagtgtatgatgattacaaatttgtcaccaagaaagaccttgaaaatttagggctcacacatctcattggatcacctttcctccgagcatatatgcatgggtttttcatggatatcagactctaccacaaggtgaaattgatggtcaatccatttgcttatgaagaatataggaaagataaaattcgacagaagatagaagaaacacgtgcacagagagtccaattaaagaaactgccaaaagttaacaaagaactggcacttaaattaattgaagaggaagaggagaaacaaaagtctacgctgaaaaagaaagttaagagcctccctaatatcctcacggatgatcgatttaaagttatgtttgagaatccggacttccaggtggacgaggagagtgaagagttcaggcttctcaaccccctcgtctcgaggatcagtgagaagaggaagaagcagctgaggctcttggagcagcaggagctcaaggatgaagaggaggaagaaccggaaggaaaacccagtgatgcagaaagttcagagagctcagatgatgagaaaggttgggttgaagaagtcaggaagcagcgcagactcctgcagcaggaagaaagagtgaagcggcaggagcaactgaaggaggaccagcagacagtcctgaagccccagttctacgagatcaaagctggcgaagagttcagaagcttcaaagagtctgccaccaagcagagactgatgaacaaaactctggaagatcgtttgaaacttgaagcaaaacatgggacattgaatgtatcggacaccactgttggcagcaagcagttgacatttactctcaagaggtctgaacagcaaaagaagcaacaggaggctgaaaaactgcatcgtcaggaaaggaaaaagctgcgcaggtcggccagccacctgaggtccagacccagaagaggccggccctttcactgaccaaagaaatgtgcccacgagcaactagacgctgtgcttctccccatggattctcacaagggcatcacacccaggctccgtgtagatgtgtgtgcatggtgctggtggtctgactggcccactacccacctggagaagtccctggccctgggtgctttttccaagtggctgcccctttctcttccccctccccctcccgcccttaaatcttgtcttctcccctgctgatgatcaggcatcatttcagatattggaaaggcctccatgaagtgaaaagttcaccctactggaaacgggacattatcatgctgtaagaatggcttgggttagcccagccgtggtggcgcacgcctttgatcccaacacttgggaggcagaggcaggcggatttcctgagttcgagaacagcctggtctacagagtgagttcccaggacagccagagctacacagagaaaccctgtctgccccccccccccccccaaaaaaaaaaaagaatggtttggggttttttgttttgtttttttgtcatttgtttatttgagacttgagtcagggtttctccgtgtagctctgggtgttctggaattcaatctgtgccttgaactcatagagatccacttgcctctgcctcctgagtgctgaagttaaagggatgcaccaccaggcccagccagagtgtctgtccccactgtcttctgcccctcaggactgagtcacctgatgactgctgagtggccctgtttatgtgcatgagtatggtatgttggcaggctgactggcttgcttatattcctttgtatagtttttaagctatttttatatcaagggtataaattaataaataataagtgaacgct

SEQ ID NO: 1698 - protein, 735 aa, Mus musculus
FPHIVPVRLGFGCWGIRVGRRSVTACRAPAAPRCDAGLQPQRSEDLQPQLRQVSSRVAVPVRHALCSFSDARVEQVSISPPSLLADVRRRIELIQDFEMPTVCTTIKVSKDGQYILATGTYKPRVRCYDTYQLSLKFERCLDSEVVTFEILSDDYSKIVFLHNDRYIEFHSQSGFYYKTRIPKFGRDFSYHYPSCDLYFVGASSEVYRLNLEQGRYLNPLQTDAAENNVCDINAVHGLFATGTIEGRVECWDPRVRKRVGVLDCALNSVTADSEINSLPTISALKFNGALSMAVGTSTGQVLLYDLRSDKPLLVKDHQYGLPIKSVHFQDSLDLVLSADSRIVKMWNKDSGKIFTSLEPEHDLNDVCLYPSSGMLLTANESPKMGIYYIPVLGPAPRWCSFLDNLTEELEENPESTVYDDYKFVTKKDLENLGLTHLIGSPFLRAYMHGFFMDIRLYHKVKLMVNPFAYEEYRKDKIRQKIEETRAQRVQLKKLPKVNKELALKLIEEEEEKQKSTLKKKVKSLPNILTDDRFKVMFENPDFQVDEESEEFRLLNPLVSRISEKRKKQLRLLEQQELKDEEEEEPEGKPSDAESSESSDDEKGWVEEVRKQRRLLQQEERVKRQEQLKEDQQTVLKPQFYEIKAGEEFRSFKESATKQRLMNKTLEDRLKLEAKHGTLNVSDTTVGSKQLTFTLKRSEQQKKQQEAEKLHRQERKKLRRSASHLRSRPRRGRPFH

SEQ ID NO: 1699 - DNA, 141079 bp, Homo sapiens
  misc_feature (1)...(141079): n = a, g ,c or t
tttgtttgttttgagatggattctcactctgttgaccaggctggagtgcagtggcgcaatctgggctcactgaaacctctgcctcccgggttcaagcaattctcctgcctcagcctcccgagtagctgggattacaggcaagtgccaccacatccggctaatttttgtatgtttagtagagaccggggtttccccatgttggccaggctggtctcggacccctgacctcaggtgatccacccccctcagcctcccaaagtgctgggattacaggcgtgagccaccatgcctggcctgactttgttcttttttaaagtgttttgagaaaaaacactttgcattcctatatacattttagaatcagcttgtcaacttctatcaaaaaaaagattactgagattttggttgtgggattgtgttgaatgtatagattaatgtggtgaaaactggaatcttaaataagtcttatcctgaattgtttacttatttcccctattctccaactgtccaccaaaacttcctcttactgatgtatattgtgtcttaggtagagtaccattatctactatcctggctgactttataactgggaggcacttttaacttcgccctcttcctcagccctaacaacaatctttaaggctggctgaatttgccccctaaatcttactggattcattcatgactctttgtccccatgactgctatgctaatgtaggccttcctcgtttctcaccggggtaactgcaatcacggcataactagtttttctgctctaggctggaccctgcaaatctactttgcactcagcctcagaaagatggctcttgcaaatctgaccacgccactctggctcaaagcccatgggttctaagttgcagtcctgatggctttgacctgagatgcagcgtgctcatgatctggccctttcccacccttcagttgcatttcctgatattccctgtactctgttctttctgaaagtcttgtgactaagaagggaccccacagatgaataagggtcccttcttagtgtgcccataatgctctgtacacaggaccagctacacaatttcaagaacctagtgccaaattaaaacatggggccccttgttcaaaaatggttaagaatttcaagaggtgacagtagaatgttaaaccaagtgtggggcccatctgagcagggggaccctatatgaccatgccgggcctgggcacatctcatgcttgttattgtctctgtttctgtgatacaaacaggcagccctagagctctggagatcccaggcaaatcatccatgaggtaagttgctttcttccaaaatcaatggctttggcttttgttataatctgattaacgtaaatgctcttacaaggtcaaacattcatagttttacagtccagttactcagttctgaaaactgcagttaactaatgacaatgtgtgagaacccctaagatcaggcatcgtgagtcgtgattaaacggattgctgtggtcacaatgtcagccagcagtttcatcacaaagatagaggttgtgataagcattcagacacagaagttaccttggggtcaatttgtattctgtgtagtataattagcctgtgcttattctcagtaaatatctgacaatgttcttattcaaaggattctataaattaaatgtccctccccagaatagattggaaatgcacatttatttgtacttggtattactcatacaacacttaggtgtgtgattaaaggaggaaatgtacagtgagctagcatcccctggttttggcagggtgtgggtgttgactgtggcatggtttgggacccaggctctagcaaaggtcttcatgggcaagtctaagggtcttttggtctgtcctactgccaagccacctgacttcattcatcagtccctagaatgcttcatcaatgcagacaaacatctcagccagccttttatttctatttctacttgttatttttttgagaaggagtcttgctctatcgcccaggctggagtgcagtggcacaatctcagctcattgcatcctccgcctcccgggttcaagtgattctcgtgcctcagcctcccgagtagctgggactacaggcacgtgccactacgcccggctaattttttgtgttttaagtagagacagggtttgaccacgctggtcaggctggtctcaaactcctgacctcaagtggttacaccactccagcctgtgcaacacagcaagactccttctcaaaaaaataaaaaataaaagttttttaaaaatacaaaaaatgaacaaaattagccaggtggggtggtgtgtgcctgtagtcccagctacttgggaggcttcagtgcgaggatctcttgagcccgggaggtcaaggctgcagtgagccgagatcacaccattgcactccaacctggttgacagattgagactctgtctcacaaaaaaaaaaaaaaaaaaaaaaaaaaaattcttaagactttttaattgcaaaaaagagaaagtaagttgtaaatctacaaatatcctagagttcccatttaccaccccccgcctcgcacccagcactctggttgttaacatcatacataaccctggtatatatatcaaaatatgaaatgaacactgatacaatgctgtcaactaaactgcagattttattcagatataaccagcttttccactaatgtcctctttctattccagcattgagtccaggacaccacattgactaaagacataattcttttaaatgttacttaaagatgtacaaatagaaacctagttacaaaatgtattatgcttttaactcttgtattattataaaccaaaccaaaacaaatttatattttcttttttttttgagacagagtctcgctgtgtcacccacgctggagtgcagtggtgtgatcttggctcactgcaacctccatctcccaggttcaagcgattctcctgcctcagcctccggagtagctgggattacaggcatgtgacactatgcccggctaattttttgtaattttttttttttttttttttgtagagacagggtttcaccatattagccaggatggtctcgatctcctgacctcgtgatccgcccacttcggcttcccaaagtgnnnnnnnnnnnnnnnnnnnnnnnnnnnnnnnnnnnnnnnnnnnnnnnnnnnnnnnnnnnnnnnnnnnnnnnnnnnnnnnnnnnnnnnnnnnnnnnnnnnnnnnnnnnnnnnnnnnnnnnnnnnnnnnnnnnnnnnnnnnnnnnnnnnnnnnnnnnnnnnnnnnnnnnnnnnnnnnnnnnnnnnnnnnnnnnnnnnnnnnnnnnnnnnnnnnnnnnnnnnnnnnnnnnnnnnnnnnnnnnnnnnnnnnnnnnnnnnnnnnnnnnnnnnnnnnnnnnnnnnnnnnnnnnnnnnnnnnnnnnnnnnnnnnnnnnnnnnnnnnnnnnnnnnnnnnnnnnnnnnnnnnnnnnnnnnnnnnnnnnnnnnnnnnnnnnnnnnnnnnnnnnnnnnnnnnnnnnnnnnnnnnnnnnnnnnnnnnnnnnnnnnnnnnnnnnnnnnnnnnnnnnnnnnnnnnnnnnnnnnnnnnnnnnnnnnnnnnnnnnnnnnnnnnnnnnnnnnnnnnnnnnnnnnnnnnnnnnnnnnnnnnnnnnnnnnnnnnnnnnnnnnnnnnnnnnnnnnnnnnnnnnnnnnnnnnnnnnnnnnnnnnnnnnnnnnnnnnnnnnnnnnnnnnnnnnnnnnnnnnnnnnnnnnnnnnnnnnnnnnnnnnnnnnnnnnnnnnnnnnnnnnnnnnnnnnnnnnnnnnnnnnnnnnnnnnnnnnnnnnnnnnnnnnnnnnnnnnnnnnnnnnnnnnnnnnnnnnnnnnnnnnnnnnnnnnnnnnnnnnnnnnnnnnnnnnnnnnnnnnnnnnnnnnnnnnnnnnnnnnnnnnnnnnnnnnnnnnnnnnnnnnnnnnnnnnnnnnnnnnnnnnnnnnnnnnnnnnnnnnnnnnnnnnnnnnnnnnnnnnnnnnnnnnnnnnnnnnnnnnnnnnnnnnnnnnnnnnnnnnnnnnnnnnnnnnnnnnnnnnnnnnnnnnnnnnnnnnnnnnnnnnnnnnnnnnnnnnnnnnnnnnnnnnnnnnnnnnnnnnnnnnnnnnnnnnnnnnnnnnnnnnnnnnnnnnnnnnnnnnnnnnnnnnnnnnnnnnnnnnnnnnnnnnnnnnnnnnnnnnnnnnnnnnnnnnnnnnnnnnnnnnnnnnnnnnnnnnnnnnnnnnnnnnnnnnnnnnnnnnnnnnnnnnnnnnnnnnnnnnnnnnnnnnnnnnnnnnnnnnnnnnnnnnnnnnnnnnnnnnnnnnnnnnnnnnnnnnnnnnnnnnnnnnnnnnnnnnnnnnnnnnnnnnnnnnnnnnnnnnnnnnnnnnnnnnnnnnnnnnnnnnnnnnnnnnnnnnnnnnnnnnnnnnnnnnnnnnnnnnnnnnnnnnnnnnnnnnnnnnnnnnnnnnnnnnnnnnnnnnnnnnnnnnnnnnnnnnnnnnnnnnnnnnnnnnnnnnnnnnnnnnnnnnnnnnnnnnnnnnnnnnnnnnnnnnnnnnnnnnnnnnnnnnnnnnnnnnnnnnnnnnnnnnnnnnnnnnnnnnnnnnnnnnnnnnnnnnnnnnnnnnnnnnnnnnnnnnnnnnnnnnnnnnnnnnnnnnnnnnnnnnnnnnnnnnnnnnnnnnnnnnnnnnnnnnnnnnnnnnnnnnnnnnnnnnnnnnnnnnnnnnnnnnnnnnnnnnnnnnnnnnnnnnnnnnnnnnnnnnnnnnnnnnnnnnnnnnnnnnnnnnnnnnnnnnnnnnnnnnnnnnnnnnnnnnnnnnnnnnnnnnnnnnnnnnnnnnnnnnnnnnnnnnnnnnnnnnnnnnnnnnnnnnnnnnnnnnnnnnnnnnnnnnnnnnnnnnnnnnnnnnnnnnnnnnnnnnnnnnnnnnnnnnnnnnnnnnnnnnnnnnnnnnnnnnnnnnnnnnnnnnnnnnnnnnnnnnnnnnnnnnnnnnnnnnnnnnnnnnnnnnnnnnnnnnnnnnnnnnnnnnnnnnnnnnnnnnnnnnnnnnnnnnnnnnnnnnnnnnnnnnnnnnnnnnnnnnnnnnnnnnnnnnnnnnnnnnnnnnnnnnnnnnnnnnnnnnnnnnnnnnnnnnnnnnnnnnnnnnnnnnnnnnnnnnnnnnnnnnnnnnnnnnnnnnnnnnnnnnnnnnnnnnnnnnnnnnnnnnnnnnnnnnnnnnnnnnnnnnnnnnnnnnnnnnnnnnnnnnnnnnnnnnnnnnnnnnnnnnnnnnnnnnnnnnnnnnnnnnnnnnnnnnnnnnnnnnnnnnnnnnnnnnnnnnnnnnnnnnnnnnnnnnnnnnnnnnnnnnnnnnnnnnnnnnnnnnnnnnnnnnnnnnnnnnnnnnnnnnnnnnnnnnnnnnnnnnnnnnnnnnnnnnnnnnnnnnnnnnnnnnnnnnnnnnnnnnnnnnnnnnnnnnnnnnnnnnnnnnnnnnnnnnnnnnnnnnnnnnnnnnnnnnnnnnnnnnnnnnnnnnnnnnnnnnnnnnnnnnnnnnnnnnnnnnnnnnnnnnnnnnnnnnnnnnnnnnnnnnnnnnnnnnnnnnnnnnnnnnnnnnnnnnnnnnnnnnnnnnnnnnnnnnnnnnnnnnnnnnnnnnnnnnnnnnnnnnnnnnnnnnnnnnnnnnnnnnnnnnnnnnnnnnnnnnnnnnnnnnnnnnnnnnnnnnnnnnnnnnnnnnnnnnnnnnnnnnnnnnnnnnnnnnnnnnnnnnnnnnnnnnnnnnnnnnnnnnnnnnnnnnnnnnnnnnnnnnnnnnnnnnnnnnnnnnnnnnnnnnnnnnnnnnnnnnnnnnnnnnnnnnnnnnnnnnnnnnnnnnnnnnnnnnnnnnnnnnnnnnnnnnnnnnnnnnnnnnnnnnnnnnnnnnnnnnnnnnnnnnnnnnnnnnnnnnnnnnnnnnnnnnnnnnnnnnnnnnnnnnnnnnnnnnnnnnnnnnnnnnnnnnnnnnnnnnnnnnnnnnnnnnnnnnnnnnnnnnnnnnnnnnnnnnnnnnnnnnnnnnnnnnnnnnnnnnnnnnnnnnnnnnnnnnnnnnnnnnnnnnnnnnnnnnnnnnnnnnnnnnnnnnnnnnnnnnnnnnnnnnnnnnnnnnnnnnnnnnnnnnnnnnnnnnnnnnnnnnnnnnnnnnnnnnnnnnnnnnnnnnnnnnnnnnnnnnnnnnnnnnnnnnnnnnnnnnnnnnnnnnnnnnnnnnnnnnnnnnnnnnnnnnnnnnnnnnnnnnnnnnnnnnnnnnnnnnnnnnnnnnnnnnnnnnnnnnnnnnnnnnnnnnnnnnnnnnnnnnnnnnnnnnnnnnnnnnnnnnnnnnnnnnnnnnnnnnnnnnnnnnnnnnnnnnnnnnnnnnnnnnnnnnnnnnnnnnnnnnnnnnnnnnnnnnnnnnnnnnnnnnnnnnnnnnnnnnnnnnnnnnnnnnnnnnnnnnnnnnnnnnnnnnnnnnnnnnnnnnnnnnnnnnnnnnnnnnnnnnnnnnnnnnnnnnnnnnnnnnnnnnnnnnnnnnnnnnnnnnnnnnnnnnnnnnnnnnnnnnnnnnnnnnnnnnnnnnnnnnnnnnnnnnnnnnnnnnnnnnnnnnnnnnnnnnnnnnnnnnnnnnnnnnnnnnnnnnnnnnnnnnnnnnnnnnnnnnnnnnnnnnnnnnnnnnnnnnnnnnnnnnnnnnnnnnnnnnnnnnnnnnnnnnnnnnnnnnnnnnnnnnnnnnnnnnnnnnnnnnnnnnnnnnnnnnnnnnnnnnnnnnnnnnnnnnnnnnnnnnnnnnnnnnnnnnnnnnnnnnnnnnnnnnnnnnnnnnnnnnnnnnnnnnnnnnnnnnnnnnnnnnnnnnnnnnnnnnnnnnnnnnnnnnnnnnnnnnnnnnnnnnnnnnnnnnnnnnnnnnnnnnnnnnnnnnnnnnnnnnnnnnnnnnnnnnnnnnnnnnnnnnnnnnnnnnnnnnnnnnnnnnnnnnnnnnnnnnnnnnnnnnnnnnnnnnnnnnnnnnnnnnnnnnnnnnnnnnnnnnnnnnnnnnnnnnnnnnnnnnnnnnnnnnnnnnnnnnnnnnnnnnnnnnnnnnnnnnnnnnnnnnnnnnnnnnnnnnnnnnnnnnnnnnnnnnnnnnnnnnnnnnnnnnnnnnnnnnnnnnnnnnnnnnnnnnnnnnnnnnnnnnnnnnnnnnnnnnnnnnnnnnnnnnnnnnnnnnnnnnnnnnnnnnnnnnnnnnnnnnnnnnnnnnnnnnnnnnnnnnnnnnnnnnnnnnnnnnnnnnnnnnnnnnnnnnnnnnnnnnnnnnnnnnnnnnnnnnnnnnnnnnnnnnnttttgtaggagtgccccataatcagatttgcctgttagagagaatgagtttgtctcttatgggaggcagacttgaggctgggagaacaggaaaagggactacagtgggccaggtaggagacaatgaggtctgaactcctgcggcagcaggaacagagaaggaatctgatattggaaagaaggaaccaaatgcttcggagacctactggccatggaggtaaagaattaggagaggagccaggcgcggtggctcacacctgtaatcccagcacttcggaaggctgaggtgggaggatcacctgaggtcaggagttcgagacccgcctggccaacatggtgaaaccccgtctctactaaaaatacaaaaattagcctaaaaaattagccaggcatggtggcatgcgcctgtgatcccagctactcaggaggctgaggcaggaaaatcgcttgaacccgggaggcagaggttgcagtgagctgagatcccgccactgcactccagcctgggcaacagagtgagacactgtctcagaaaaaaaaaaaaaatttaggagagcaagcttgaatgttatttgaaggtttctggaatggcaactaacagcagaacatttaaggttagttggaatctgtaacaactagtttttctggaatagtttttaatgttttggttttctaataactagcacttatgtagtgttctgtgtaaggcactgttctaagtgctttatatgcactttattttattgactctaaaagaccattacctataagatgcaccattccctcaagatatgcacgatacactagactcatcctttcagagatgctaaaaaaaaatgaatgtcctgaaatcagtgatttatggcgtaaactcacttttctgtttttttgttttttgagacagagtctcgctcttttgccaggctggagtacagtggcgcaaacttggctcactgcaacctccacctcctggctcactgcaacctccacctcctgggttcaagcgattctcctgcctcagccacctcagtaactgggactacaggtgtgtgccaccatgcccagctaatttttgtatttttagtagagatggggtttcaccatgttggccaggatggtctcgatctcttgacctcatgatctgtcctcctcggcttcccaatgtgctggaattataggcatgagccaccatgcccagccttttttttttttttgagacggagtttcactcttgttgcccaggctggagtgcaatggcacaatcttggctcactgcaacctccgcctcccgggtttaagcgattcctgtgcctcagcctccagattagctggaactacaggtgccaaccaccacacctggctaatttttgtatttttagtacaaacagggttttgctgtgttggccaggctggtctagaactcctggcctcaagtgatctgcccgcctcagcctcccaaagtgctgggattacaggtatgagctactgcgcctggtcatgattagtttttttttgtttgtttgtttttgtttttgagacggagtctcggtctattgcccaggctggagtgcagtggcgccatctctgctcaccacaacctctgcctcccgggttcaagcaattctcctgcctcagcctcctgagtagctgggactacaggtgcgtgccaccatgcccggctaatttttgcatttttagtagagacaggggtttcactatgttcaccaggctggtcttgaactcccgacctcgtgatctgcctgccttggcctcccaaagtgctgggattacaggcgtgagccaccgtgctcagcccatgattaggtcttaagggcagagctctcatgaatgggattggtgcccttacaaaatacaggttgagtatccctaatctgaaaatccaaaatctaaaatgctccaaaatctgaaactttctgagtgtcaatgtgatgctcaaaaggaaatgctcactggagcatttcggacttgaaatgtttggattagggatgcttaactggtagacccatctctataaaaacaaaacagccagctctggtggtgtgcctgtactcccagctactcaggaggataaggtggaaggacagcttgagctcgagtttgaggctgcagtgggtcatgatcatgccactgtattccaacctggacaacaaagtgagatgcccccatggaaaaaacccacaaccccaacagaaagtagattagtggttgtctagggcttgggtgggggatggggcatggagtgaatgctaattgaggctggggtttctttttgttctaaaaatgattgtggtgatggttgcagaactctgaatacactagaagtcattacattgtacattcaatggggacattttacagtatgttaattatatctcaataaaactgttaaaaaggaaatgttaatggaatttggatacatttccacttatttggtatatggctttattttcagttttattttacaaacacttacatggtcttactatgtgccaagtactgggttccaaacgttttataaatatgaatgtatttcatcctcataactctgtgaagtggatactactgttatctccattttacacaggtacagagaggttaggtaacttacctaaggtctttcagttaaaaatggcagtcgggatttgaatcttgccagtctggcttcagagtctgtgatctttatttatttttcaagagatagggtcttgctgtgttgcccaagctggagtacagtgttagtcacaggcatgatcccattactggtgagcatgggagttttgacttgctccatttctgacctgagccgcttcacacctccttaggtaacatggtggtccctggctcttgtggggtcaccatattgatgccaaactgaggacacccaacgctcgttgcgtgctacagccaagaactcctgggctcaagtgattctcctgcttcggcttcactagtagctaggacaataggcctgcaccaccaagccaagccagagtctgtgatctaaccattctattatgccacctttcccaaagatgtttacagtttttcttaactgtaaccagtgtagaaaattaaaaatttgtggaggatcttaaatttgaggacagagttaaggaatatatccctacgtacatggctaaatgtaaatatgtagcaatgcctaatagaggccaggcactgttctggtactctgggtaggggtggatggggtggatagggaatataaggacaaatgatatagggtccacgaagaactctcaacctaattctgatgcaatgtggtgttggtatttgagagtttccaaaatgttgtgggtaggagagcaaaacaataatatttgggttttagaaagtaaggcataaaataatttgttcattaaatcaaaggaagtaagaagatcacttgggaaagttataatccaaaaatagttaagtatttgagtttcagcaggaggaatgaaaacagattactttaaggaaatatttcataattagaaatatccaggtttagatactgaaagtgagggccagagataggaatgggttgaagatgacgccacagtcttcttttttttttttttttttttttgagacggagtctcactctgttgcccaggctggactgcagtggcacgatctcagctgacggcaacctctgcctcccgggttcaggcgattcccccacctcagccttcagagtagctgagattacaggcgcgcgccaccaggcccgactgatttttgtatttttagtagagacggggtttcaccatcttggctaggctggtcttgaactcctgacctcaggtgatccgcccgcctcggcctcccaaagtgttaggattacaggcgtgagccaccgcacccggcctacagtacttctaacgtaacatcgcagaaacactggaggagagaagagaatacacttccactcggaattcgcaccctggtcgccttcattcgctgggttcactcgctgaactgcctcgcccccgcccgggaggatgacatctcggcctgggcagagactcgaaagcctcctcctgccgctcgggatgctaacagcagggagagctgtgtctagtttttttttttttttttttttttttgagagggaatctcgctctgtcccccaggctggagtgcagcggcgcgatctcagctcactgcaacctccgcctcccaggttcaagcaattctcctgcctcaacctcccgtgtagctgggactacagatgccggccaccacgcaaggctaatttttttgtatttttagtagagacggggtttcaccatattggtcaggctggtctcgaactcccgacctcaggtgatccgcccgcctcagcctcccaaagtgctgggattacaggcgtgagccaccgcgcccggcttgtgtctagtcttgcccgtagcagcgtcgccgacagccacgccgggttgtcagagcctcactagtttttctcccggccgccgctcttcccggattcagccaccttccctcttccgggaacttgcccgcgtgttccggctccaggaagtgcgtcatcagtcggcgccagcggccgcacgccgcggagcaggggctcggaggtcccgggattacggtgctcgagcacgctggtgggaaaggacccgggacttgaacagtgttgtgcggcgccatgcaggtctccagcctcaatgaggtgaagatttacagcctcagctgcggcaagtcccttcctgaggtgagtcacttcccggccccctcactctcgagctcttgggggtcgtcctcctcgtggggcagccgcccctctcctcggccctagcctctgttttagctggacgctggtcaccccccgactcggggaggcccagaggcggctgacaatttccgggggaggtgtcggcattgggagacaaggacactgccgtcaccgcgccagaaactggaccaagggataatcagggtcagtgagctttgctggaacttttgtaaagttctctgttccagagaacgcaaccatttgggcctctttgggtgttcacagtccctgccgtacatcgaggaggaaaacgtggcagattcgttgacacatctctcccccatatggccatcagctgtttgtggagtccctatcatttgccaggtcttagggatacaacagtgaacaagggagatacagacttcgcatctgcagaatttatggtgtagaggacagtattttcgagacttgttgaacttaacctgattcctagtcttaaagttggagagggcttggacaagtcggtaattctcttccaatcttctcgtgtttagtaatgcagctgagatttaataatgcgtttaatatgcagctgagatccagcaaggggaagggtgacttgtccagcatgacacacttaggctctgaaacttgtcttttgtttcttatacgtgatgatccagcctctgtccaagcactaccactgagcactaccttttgtggaagctcatttccattttgagactctgcacttgttagaaagtggttttcaaatatgtcaccttatagcatgccactgttggcctgagtcctgcccttggaaaacagaataaatatagctctccttccatgcgtctgcttctacaaaaatttggagccagtgcttaggtttttcctttcttcctaaaattctggtttgaataattccctgtcttccagttgttcttcacaccccatgagctttctcattttgttcattcattctccacatgtattgagaagttactgtgtgcaagcaactctgttttaagtattgggatctatagtggacatttcagataaggttccctgttggggaaaagggaaataaacaagtgagcaaataaggcaatttaaggtagtcaaaaagtacttttcgtgatgaatgattagaagagagctgttttggataaaatattgagagaaagtgttttggataaaaccttcggggaaggcctctctacaagaggtgacatatgagcagaaacttggatgatgaagaggagccagtcgtgtgaagatgtggggaagagttttcagtgctgagaacagaaagtgcaaaagccccacatgggaatgcactggacatgtaggaggacggaagaggcacaggtgtgattgcactatgctgagtgagggggcgagagcagggtggatgaggctggagaggtaggcctggtaggaaaggtaggaagttcaagttttattcttagtgctgctggaagtcactgttgtgtgggctgctgtgcgacaaatgtctagctggggagggttcaagtcgggatgaattaggtagtccaggtgagcgacttcggtggcttgggcttgcctggtaacaaagaagatgctaaaacacagtgagattcaggacatactttgtagatagggtaatggaacttgctaatggattggactgttggtagagggaagttgaggtgacaaaaaggaaggaatcagagaactcttcagttttgagtctgaacaagtgggtgcacggtggtgctgctaactgacatggagaagaatcaagaaggaacacattgaaaggtggagaggaggaacgtagtgagcaaaaagaatcaagatttttttttgaggtcgcgtgcaatggcctgatgttggctcactgcaacctctcgggttcaagcgattctcctgcctcagcctccccagtagctgggactacaggcacgtgccaccacaccagctaatttttgtatttttagtagagacggagtttcactatgttggccggtatggtctcgatctgatcttgtgatccacccacctcggcctcccaaagtgctgggattacaggcatgagccactgcacccggcccaaggtttttattttcaatagtgaacatttgaagttctaatacataccaaatggagatgttgagtagttagcagttgcatggatactaggatggagattgcaggtgaatttactgtcgttatttgggactaggtgagatcaaattgtgagagaaagaacagagaagataactaggctgaggacctgaggcagtcttagcatttgtcatccaagaagaggaggggaacccagcaaagaagaaagagtagtgggcactgatggaaggggagactgggaaatgtgtagttttgtagaagtaagtgtttcaaggaggaggtggtggtcacctgtgtcagctgctactgagagcttcagtaagatgaaggcagaaaaacgaccatcgactttggcatgatgcagagcgcccttgaccttggcaaggagctccagtggagtggtggggagggtagcttgagctgagtggatttggaaacccctgcttgtcctgtttaatattttctggttatttctttgaggtgtggtgcctaaactacacgtggaaccccagttgttgtctgatctgtgcaaatattgcttctctccttctgggctttacctttttattaatgtagagaagcctctacgtttactcccctggtgatcctaggcagtctcctggctttaagcacatctgcatatcgataactatcacattgatgtttctagcccttacctctactctgaactggacttgtgtatccaactgtttcttgacatccccgcttggatgtctgataggcatctcaaacttaacttgtccaaagtagaacaccagctttccccccacatttccccctcctgcaacctagtggtcttccctccctcagccagtggcaactccatcccgcaagctgttgatgccaaaaacactggaggctttttgttgttgtttctttgctctcatacaatccactagaaaatgctgttgcttctatcttcagtatagatccagaatccagtcacctccattactgtcactgattcaagacactgtcacccctgactatgcaattgcagttattgcagttgacttctaagcagtttctcagtttccaccctctacccctttattccacagtctgttatcagtaagctgccagggtgatcctctactcagaactgtccagtggctcctgctctcttgggggtgaaaagcagagtcctttgagtgacttttaaggtcctacttgatgttgtgccttcctgccctcctctctgagctcagcggtcactgttctccaccttacactggcctcacaagtctcactgctcgagaccaggcacactcctgccgtaggaccttggcacaggtcctgcctgcctgcttttttcccagatgttctccaggctttgcctcctcatgcctttcaggtcgttgctcaagaggaccttaaccttattcaaaattataattctccaccaacacttcgtctccttttcttgctttattttttccatggcatacataaccatctgacattctaattgttttacttccttatttgttggtgttccctcacttgaaagaaagcttcatgaaaggaggggtttttagatttttaaattttttttttttttgaaacaggtttactctgttgcccaggctggagtgcagtggcacaatcatggctcacctcagccttgacttctctgggctcaatgattcttgcacctcagcctactgagtagctgggactacaggtgtgtaccaacatgcccagctgcttttttttttttgtagagacagtgatcccactttattgccaggctggtctcgaactcctgggctcaagtgatccccttgcctcagtgctgggattatagatatgaaccactgcacttggccaagagggcttttttttccctcctgttttatttactactgctatacctaattactggcatttagtagtactaaataaatatttgtttaatgtattgatgaataaagttaattttcattttcagctccatcacacttttgacttggggctacgatttttattcacacaatttgacctacagtctcccattctggagttaatcagcttttgttgtatttttaatgccgttaaatttattttcgttagttttctagtggttaagcctgtttttttttttttttttggcgggggggggggggggggggacggagtctctctcagtcaccaggccggagtgtagtgggaagatctcagctccctgcaacctccgcctcccgggttcaagtgattccccttcctcagcctcccgagtagctgggattacaggtgcccaccaccacacctagctaattttttgtattttggtagagacggggtttcaccatgttggccaggctggtctcaatcggcctcccaaaatgctgggattataggcgtgagccaccatgcctggccaagtatcagctatttggtcagttatttatctggttttattccttgtaaaaaatatatttctataagaaacattctcctataaatgttttactttttaaattctcacttaaatagattaaattgttccatatatttagttataacccataatatttgaggctttctgctttcctttagattgcttagatgggttagtttttctctatgtaaaagattgtagttcaaaaaatttcttatctggccgggcctggtggcccatgtcagtagacctagcattttggaaggcaaaggtgagaggattgtttgagcccaggagtttgagccttcggtgagctacagtcacatcgcatcattgtactatagactgggcaagcatgagaccctgtctctaaaaaagtaaaaataaaagaaattatctaatgtatgtaagtatacacaagaaaaaaaatccaggagatatttaatacgttacgagtagagttaggattagagaatattttttgcttcctatgttatatattcctatgaagtttgaatttttaaatataagcatgtattgattttgcaagccgaaaaacaatttagctaaatttgttttaaaataaactctcttcattttctttaagtggctttctgataggaagaagagagcgctacagaagaaagatgtaggtgagtattgttttttcccacttcagctgcgttagtgatccatgttctaatgcttttactcatttgctgttatatataagtgaggatttataagaatgcggtaacatgtagtggaaaatgaatgctcttgtcccttttcttttttttcctttgacatggggtctcactgtgttgcccagactggtctctaactcctgggcttgagcagacctcccaccttggcctcccaaagttttgggattacaggcatgagccactgtacgcagctcttctcctttttttttttttttgagatggagtttcactcttattgcccaggctggagtgcaatggtgtgacctcggctcactgcaacctccacctcctggattcaagcagttctcctgcctcagcctcctgagtagctgggattacaagccaccacgcccggctaattttttttgtatttttagtagagatggggtttctccatgttggtcaggctggtctcgaacttgcgacctcaggtgatccacctgccttggcctcccaaagtgctgggattacaggtgtgagccaccgcgtccggccgcctttctccttcttaagaaactttttgttgtggttggtatgttcctggtgggtatgggatttgattttaccttattaactaataagttagcctgttaccgtttcatggataacaatagtagacgcaagactcctgggctagaaatgcagatgttattactcacagcacagtagatagcatgaacatcagcatatttgtgccagttcccctcttgggtctcctggggacacttagcacagtccaggtggatgcttggcacacagtggatttgcgttgtggccgagcaacacagcttgggaagtccactgcttttctggcaagcagtaagcaaacctgtgttttgtccagaagggacaggttacctgtctatcaaggttctcagcagtgtaaacaaccctgagaaatggctcaggtaagagtggctggggtcttgcaatctcgccatacccagtaagcatgcaggtccaaggaggactgtctctcctaacaggtccctaattgctttgctctcttgtgtatcaaaatcttatcgtgtaaattaaatccatttatcagtgtttgagatacagagacaatgagcatttcttgaagaaaggaattttacatgtagggtttatgaatctgaacaattaaaggtgattgcagaagatgttggttcttttaaatttacggcagcaagaaattgtaagaaaaatttctaacttaaataattttggtgcacaagttttcattatattttcttcattatagcttgtcacatatgaaagaaaatttattttcccatatattttgtttaacttactctttaaaaacctaaggtatcaaaggggtttcctcttgtctgcagataattggttccaaaagaggtataagtcagcttcgtagcagtttcttatataaacttaagaggttgggtcaggcacagtggcttatgcctgtaatcccagcactttggaaggcccaggcgggcagatcatgaggtcaggagttcaagaccagcctggccaacgtagtgaaaccccgtctctactaaaaatacaaaaattagccaggcatggtggtgcgtgcctgtagccccagctacttgggaagctgaggcaggagaattgcttgaacctgggaggtggaggttgctgtgagccaggattgtgccactgcactccagcttggacaacaggtgagacttgtctcaaaaaaaaagagtttggagagtttgggggcttaaacctgttacttaggagaaaaaaaagttggatttttgtctttgccatgattgagtagtaatagtggtttaggggcccagtgcggtggctcactcctgcaatcccagaagtttgggaggctgaagtgtgaggattgcttggccctagaagtttgagaccagcctgggcaacgtggcgaaaccccatctctacaaaaaatacaaaaatacctgggtgcagtggcatgcgcctgtagtcctagctatttgggggggctgaggtgtgaggatcgcttcagcccgggaggttgaggctgcagtgagccatgattgtgccactgcactccagtctgggtgacagagtgagaccctgtctcaaaaaaaaaaaaaaaaaagtggtttaatgtttatgctcttcctcctgtaacactggatgtttgatacactgttgtggaaaattttttttcaattaatgatgctactttttttattcttgaaaagtaaaaatgaaatacttagcttagaaaaacaacgtatgagctaaggaaaaaacctctgctgtttaatggttgggctgtgctggtgacctttcccaaggccaggaagcatttgggatgaatttcacctgtttatagttgtggtgactgcttggtacccatttgtcttcttatgatagagaataagcacatgttagttaaactagttgtttttttctctctttttagatgtccgtaggagaattgaacttattcaggactttgaaatgcctactgtgtgtaccactattaaggtgtcaaaagatggacagtacattttagcaactggtaagcatctttttggttatgattttcatgcattttgtaccaggaaatgctgcgatgggaaaggtctttttttttttaaccctaatattttattataaaaaatttcaaacacacagaaatattgaaaaaattgtatagtaaacacccatttaactactacctaaattctgcaataaatagtttactctgcagtatttgatttatcccatgcatctgtctctttgttcatgtatcagtccatcttgtttctttgatgcatttcagtgtaagttgaagataccagtatacttcaccctgaaacacttcagcaagtatatcattagctggagttcaatatttatcagtatttacttatagcctttttcaaggtaaaaacatttatattggtgaaatgcacagatcctaagtttaccatttggttagttttgacaaatgcacacgcttgtgtaactcaaagctctatcaagatacagaacatttttttcctgcagaaaatttctcccacccatgcagagacaaccattgctgattttttttcaatatagacaagtttagcctgtttcagaacttaatataaatgtagtcatacactgtatattctttctctgtgagacttatttcatgtaggattttgtatttgaggttcatacatgttgttatatgtgtcaatagcttcttttttttttttattaccaaaagatatttcattctatgactaagccacagtttatttacccattctccatgtgatgaacagctaggctgttttcattcaggtttttggctgttactaataaagcactatgaacaatcgtatagaagtctgttttgtgggtataagctttcatgtctttggtgaatacctaggagtggaatttttgagtcctaggtaggtgtatgtttagtgttctgggaaacttctaagtcgttccccaaagtgatcatatcatttgcactcctactaacaatgaatgagagttttaggaaaggtcacttataacatgattttctgtataatgtactaatttttaaaaatatctctaagattttacattaacagtatttatcgttatcaaaaaatcatgaaatgtagaaaacttttagtgtgttggagtgttgaacagtatcacccaacctttagtggttgtgattttggcgcgtaagtcctgtatattgtccaaacattttttgctgataacagtattccttttccaaccactttctttttggtaataccttttatacatacacaggccagtctcttttgctttgtgttaatgattatctcagtactaactaacactatctacatctcttagccttcagttttatgttcagaaactggtaaaaagaattgaggaaatctaagatacatggacacccttactgaagactagaagaaactcaaattttcttcattttatagatccagagatattaagtgacttgtctaggctcacagatctagtacttaagaaagctaggatatagatttgttaaatgacactttcttttatgaaatcgtcctctattcccatgcaaaattaatggttccttttctccttctcctccctctccctctccctcttctccctctccctcttctccctctccctcttctccctctccctcttctccctctccctcttctccctcttctccctcttctccttcttctccttcttctccttcttttttaagagtctcactctgtcacccagtctggagtgcagtggcatgattttggctgactgcaacctccgccttccgggttcaagcgattctcctgtgtcagtctcctgagtagctgggactacaggtgctcgccaccacacccggctaatgtctgtatttttttagtagagacagggtttcaccatgttggccaggctggtctcgaactccttgcctcaagtgatccgcccaactcgcccttccaaagtgctgggattataggtgnnnnnnnnnnnnnnnnnnnnnnnnnnnnnnnnnnnnnnnnnnnnnnnnnnnnnnnnnnnnnnnnnnnnnnnnnnnnnnnnnnnnnnnnnnnnnnnnnnnnnnnnnnnnnnnnnnnnnnnnnnnnnnnnnnnnnnnnnnnnnnnnnnnnnnnnnnnnnnnnnnnnnnnnnnnnnnnnnnnnnnnnnnnnnnnnnnnnnnnnnnnnnnnnnnnnnnnnnnnnnnnnnnnnnnnnnnnnnnnnnnnnnnnnnnnnnnnnnnnnnnnnnnnnnnnnnnnnnnnnnnnnnnnnnnnnnnnnnnnnnnnnnnnnnnnnnnnnnnnnnnnnnnnnnnnnnnnnnnnnnnnnnnnnnnnnnnnnnnnnnnnnnnnnnnnnnnnnnnnnnnnnnnnnnnnnnnnnnnnnnnnnnnnnnnnnnnnnnnnnnnnnnnnnnnnnnnnnnnnnnnnnnnnnnnnnnnnnnnnnnnnnnnnnnnnnnnnnnnnnnnnnnnnnnnnnnnnnnnnnnnnnnnnnnnnnnnnnnnnnnnnnnnnnnnnnnnnnnnnnnnnnnnnnnnnnnnnnnnnnnnnnnnnnnnnnnnnnnnnnnnnnnnnnnnnnnnnnnnnnnnnnnnnnnnnnnnnnnnnnnnnnnnnnnnnnnnnnnnnnnnnnnnnnnnnnnnnnnnnnnnnnnnnnnnnnnnnnnnnnnnnnnnnnnnnnnnnnnnnnnnnnnnnnnnnnnnnnnnnnnnnnnnnnnnnnnnnnnnnnnnnnnnnnnnnnnnnnnnnnnnnnnnnnnnnnnnnnnnnnnnnnnnnnnnnnnnnnnnnnnnnnnnnnnnnnnnnnnnnnnnnnnnnnnnnnnnnnnnnnnnnnnnnnnnnnnnnnnnnnnnnnnnnnnnnnnnnnnnnnnnnnnnnnnnnnnnnnnnnnnnnnnnnnnnnnnnnnnnnnnnnnnnnnnnnnnnnnnnnnnnnnnnnnnnnnnnnnnnnnnnnnnnnnnnnnnnnnnnnnnnnnnnnnnnnnnnnnnnnnnnnnnnnnnnnnnnnnnnnnnnnnnnnnnnnnnnnnnnnnnnnnnnnnnnnnnnnnnnnnnnnnnnnnnnnnnnnnnnnnnnnnnnnnnnnnnnnnnnnnnnnnnnnnnnnnnnnnnnnnnnnnnnnnnnnnnnnnnnnnnnnnnnnnnnnnnnnnnnnnnnnnnnnnnnnnnnnnnnnnnnnnnnnnnnnnnnnnnnnnnnnnnnnnnnnnnnnnnnnnnnnnnnnnnnnnnnnnnnnnnnnnnnnnnnnnnnnnnnnnnnnnnnnnnnnnnnnnnnnnnnnnnnnnnnnnnnnnnnnnnnnnnnnnnnnnnnnnnnnnnnnnnnnnnnnnnnnnnnnnnnnnnnnnnnnnnnnnnnnnnnnnnnnnnnnnnnnnnnnnnnnnnnnnnnnnnnnnnnnnnnnnnnnnnnnnnnnnnnnnnnnnnnnnnnnnnnnnnnnnnnnnnnnnnnnnnnnnnnnnnnnnnnnnnnnnnnnnnnnnnnnnnnnnnnnnnnnnnnnnnnnnnnnnnnnnnnnnnnnnnnnnnnnnnnnnnnnnnnnnnnnnnnnnnnnnnnnnnnnnnnnnnnnnnnnnnnnnnnnnnnnnnnnnnnnnnnnnnnnnnnnnnnnnnnnnnnnnnnnnnnnnnnnnnnnnnnnnnnnnnnnnnnnnnnnnnnnnnnnnnnnnnnnnnnnnnnnnnnnnnnnnnnnnnnnnnnnnnnnnnnnnnnnnnnnnnnnnnnnnnnnnnnnnnnnnnnnnnnnnnnnnnnnnnnnnnnnnnnnnnnnnnnnnnnnnnnnnnnnnnnnnnnnnnnnnnnnnnnnnnnnnnnnnnnnnnnnnnnnnnnnnnnnnnnnnnnnnnnnnnnnnnnnnnnnnnnnnnnnnnnnnnnnnnnnnnnnnnnnnnnnnnnnnnnnnnnnnnnnnnnnnnnnnnnnnnnnnnnnnnnattgcaccactgcgctccaacctgggcaacagcgaggaccctgtctctaaaaaaaattaaagccccaaaaacaaacgacagtggaataaaggtcctggctatattaaaagttttatgtatagcctttcaaattatgtgtgtgtgcacataaaattatgtgtgtatatatatgtatctgtctatatggatatatatgtacacacacatatatacacacgcatatatatgtgtatatacacacacacacacacacacacacacacacaaatgtattaaaattattgccatacgacagtgggctcatatttactggttttaaacttctcttttttaagctgggtgcggtggctcacgcctgtaattccagcactttgggaggctgaggtgggtggatcacttgagcccaggagtttgagaccagcctgggcaacgtggtgaaaccccatctttacaaaaaatacaaaaattacacagtcgtgatggcaggcgcctcttggtccccactacttgggaagctgaggtgggaggatcactggagcccagggcggttgaggttgcattgagctgtgattgcacctctgtgctccagcctggttgacagagtgagaccccatttcaaaaaaggaaaaaaaaaaaaaacaccaaagaaaaccccacaaaataaccttttttttttctttaaacgaaatcttgggttttgatctatgccagaaaacaaaggactacctcattcttttatttttaagatgtctttgttggaaatacataacataaaatatgaaagtctccgaaattgcacttcacggagatagactatcattgtgaagttagttcctccaacttttgccttacaaagtgccaaagttaggccaggcatggtggctaactcctgtaatcccagcacttaggcaggcggagacaggcagatcacctgaactcaggagttcaagaccagcctggccaacatggtgaaaccccatctctactaaaaatacaaaaattagccagatgtggcggcaggcacctgtaatcccagctacttgggaggctgaggcaggagaatcacttgaatccaggcagcagaggttgcagtgagctgagattactcctctgcactccagcctgggcgacagagcaagaccccatttcaaagaaaaaaaaaaaaagaggccggcctcgatggctcatgtctgtaatcccagcactttgggaggccaaggtgggtggatcacctgaggtcaggagttcgagaccagcctgaccaacatggtgataccccgtctctactaaaaatacaaaaattagctgggcatcatggcctgcacctgtaatcccagctactcagggggctgaggcaggagaatagcttgaacctgggaggcggaggttgcagtgagccgagatcacgccattgcaccccagtctaaatgacagaatgagactctgtctcaaaaaaaaaaaaaaaaagacaaagtgccaaagttaccatttcattgtacaaaattgggatcgtattatatggatcattctccagcactcacctgtgctccccctgtacttttactttatagtacgttttggcagctttccatgtcaatggttactactgaggtctgcctcatccactttatgggctatgtaatattcccttgtgtggatttattgtcatttattcaactattttcctgtcagtggacattttattgctttcagttgctgaccatttataaataatgctgcagtgaacattcttaatatctttggcaggcttgtggatatatttctgtgagttcaatttatgtaagttgaaatatagattgaaagtatggaaacatcgtgtgtttttagggattgtccttcaaagaagttgtatcaattgtatactaatcaacaacagtataggggaatattttatactttcaccaacacagatattaaccgttttttaatctttgccattctggtggacaaaactgtttcattgtttgcatgtattttgttagattacttgtaggtttcttagttattttgtttggttttctatgacttgcttgtttagcttttgctcagtttttccttggggtgtttgagaggggctgcttttacattcctttcttttgatttggttacaattaatcctgcctgtctctgaacaagaagtacactcaatgtatctggatgttttgactatgaaagtatgtctttaggttttacatcacattaattttttgtaggaacatataaacctcgggttcgatgttatgacacctatcaattatccttgaagtttgaaaggtgtttagattcagaaggtgagtaaaaagctaaatttgaattcatgaaaatggctttttatgttgtctgcttttctggttttaaaatgagaatggtttgtaattagttttttattgctgtataacaaattactgtactacaatcccgatggcttaaaacatccatttagtagctcacagttgtgtagatcttaagtctatgcaggttctgtgctcagacaggaggtcagggtgttgaccaggtggagctctgacttggaggtgctgggcaagaatatgcttccacgtgttagtttgtagttcttttagaattgactggcagcttttcttgttttcagagaatgcaccccccccaaacccccaaaataataaaaaataaaaaagaatttgcttccaaatacactcaggttgttgtcagaattcagtttgttgtggttataggattgtggttcccatttccttctggctgtcagctgggggccactctaggcttctagaggctgcatgcatttctcatcacacactcacctccaccttcaagccagcaacagctcatcagatcctccctgtatttcttttctttcttttatttatttatttattacttttttaaagagatagggtcttgttgcccaggctggagtgctgtggcatgatcatagtttactgtagccttgaactcctgggctcaagtgatcctcctaccttagcctcccaagtagctagaactacagatgtgaaccaccatgccccactaattttataattttttgtagagatggagtctagccatgttgcccaggctggtctcaagctcctggcctcagccgtccttttgctttggtctcccacagtactggaattccaggcatgagccactgcacccagccccttgtgttttggatctctctgactttttcttctgctgccagccagagaaactctgcttttatttatttacttatttattttttggagacggagtcttgctctgtcgcccaggctgaagtgcagaggcacaatcttggctcactgtaaactccacctcccagattgaagtgattctcctgcctcagcctcctaagtggctgggattacaggcgcactttaccacacccagctaattttggtatttttagtagagatgggtttcaccatgttggtcaggctggtctcgaactcctgacctcgtgatccacccgcctcgacctcccaaagtgctgggattacaggcatgagccactgcgcccagctgaaactctgcttttaaagggctcatatgattataaatctcccctttgccatagaatgtaatgtaatcatgggagcaatgtcttatcaattcacagtttctacccacactctcaagggaagggggttatacgagggtaaaggtcactgggggtcattcttagaattttgaatggcactgaagtcaagttaaaatgggaaagttcaagtgcttttatcagttggcctagaatttgggattgaggggaaaggagttaatgggatatgtggtctgtggaattatatgcatagtctcccaacttgtttcaccctttgttgtttttttttttatttttactttttagaaacaggatctttttctgtcacccaggctggagtgcagtgttatgatcacagctcactgcagcctcaactacccaggctcaagagatcctcctacctccgcctcccaaatagctgggatcacaggcatgcaccaccatgtctggctaattttttttctgtttttttttttctttcccatagtgatagggtcttactatatctttgtttattgaaaacaatagaaactctgtgtgccactaataatggctatttttcgctctttttctttatcaggtagactatgaatgggtaaaaaatgacatcttttttgttaagcaacaatttttttgttctttaatgtatatttgaaagtctttaaaattattttgttttcaacatctcagagtgtcagaatttagaagtcattatattttgtgaatttgcattcagttctacaagaaatctagttgatgtgtattgagaaattatgaggcttttaagtttttgttggtgttttgggacaatatactatgacaattttcttcttgtttcacgtagaggcagaaaaaaactggtatgtgtataatttctgtgttgaattagaatctttgcatcaggtttgcgttgttactaagaatattgtttgataattgtatttttcctatttcttgtttttcagttgtcacctttgaaattttgtctgatgactactcaaaggtatgttttatagcattggtttgtactgactagacccaagaaatgagtgagtggaatttattttaatgataagcagttttataatatttttattgttaaactaaaatggctgtgtagttctattgttaaacaaaaatggctgtgtagtaaaatgtaacccatcattttttattaatattaatacagtgatacggatagcctttggccaatctaatatcaaaggtaatttttcatatcgtatatgaaaccttatttgtatttttaagaattggcagcagtcatcttttatatcatcctgtattctagatttgtgattctgattattacgtttaacctagatttatttgccaggttgctttcattttcttatttatatgtgaaatgtaaactagcagggttgtgtgtttaatttttttttaactttgcaaatggttgtggtatattctgaaacagttcaaaatatagctaagtagatttatttctcttttttggtgccattagtccatctttcaactctttttttttggagacagggccttgctctgtcacccaggccggaggggcagtggcgtaatttcagctcattgcagcatcagcctcccgagttcaagtgattctcctgcctctgcctcctgagtagctggaactacaggcatgtgcttccacacctggctaatttttgtgtttttagtggagatatggttttaccaggttggccaggctggtctcaaactcttgacctcaagtgatccacctgacttggcctcccaaagtgttgggattacaggcgtgagcaactgcccccgacccatctttcaactcttataatcactttcaacaattataaaattgtcagtaaactcttgaatttaaaatgaaacatttttagtgatgtcaaatggcatcttgaaagaaaattgaattttcttagctgacatggctttatattttcagttttggaaactatggggtacagcttatccttttgtctatggtatcatttatcatacgttttggaacatgtcattttagaatgtattttctctaaatactgacaaatttgcctttaaataccatctgttgatgtttaagatacccctttagtacactaaagtcaaatgtatacaaggagtttatcataacttgtgtgataatggtgggattattattattttttgttttttattttttgagacaagagtttcactcttgttgcccaggctggagttcaacggcacaatctcggctcactgcatcctccggctcctgggttcaagcgattttcctgcctcagcctcctgagtagctgggattacaggcatgcgccaccatgcccagctaattttgtgtttttagtagagatggggtttctccatgttggtcaggctggtctcaagctccctacctcaggtgacccacccgccttgtcctcccaaagtgctgggattacaggtgtgagccaccatgcccggccaggattatttaaatgtgttcccaagtgaaagagggaactgatcattgagggtaccatgagagtgctctatgttatgacatgctggtgccatgtaaatgaagggcgtttgtttcaagtctttaattagtatgtaaggtttgcagaaaagctatcaggatacaggaaggcattaaggagccgatggagtgttttcattcttaatcccagtggagtgtgtgtgcatggacatgtgtgtttagatacagaaagtgagagagaggtaagggttttccttggtttgccagttttttagcgataatgaagtaaacacctaactagaaacctaagcaaactaatttttttgttttattttcagattgtcttcttacataatgatagatacattgaatttcattcgcaatcaggtttttactacaaaaccagaataccaaagtttgggagagatttctcttaccactatccatcctgtgacttgtactttgttggtgcaaggtattggatccagtccctttttctccttttcacctcctaaaacaaccaacttctgttcctaaatttcgtgtacattttctctgtttaggtaacttgctttaataaaaaagtgatacgtggctcttgtaaaaaaaaaaaaaaaaagaaaagaaaacacaggataggcaaaaaattctattttctacatattggtttacttataagtaccatatactgttttaacaactgttgttttgcttaatacaatattttctaatgttaaaaatatctgtgatagttatgtgcctcattgggaaatactgatgggaagtgtgtgagccttttcagtttagcccggttgccacaatttatgagacatagtattgttttatttatctgtttatcttctagacttttgtctcgaccttaagtttgcttcatgtcagtaatcagtttctatctgatcactttgtgattaataggtcatatgtggttatggactctagtttaaaaaaattgggagagggttttattgttattatttttggtaatttgatagtttgatttaatttgatttgcatgaaatgacaaaagcatttaaagcatctttcattatgtagttgatgtcctacattaaacagtctactaaattctgaacaaaagtttattagcaagttttcaaaaatttaaaaaacagttgtttcaaaaccattaagtagtaaatgtatttaagaaactaattaggacagatgtcataactttagaacaccactacctacccatgtctttttgttttgttttttctgttttttttgtttgtttgtttcattttctttttttgagagggagtctcacactgtcacccaggctgcagtgcagtggtacgatcttggctcactgcaacctctgcctcccaggttcaagtgattctccagccccagcctcctgagtagctgagactatgggcgcctgccaccatgcccagctaatttttgtatttttagtagaggcgatgtttcaccttgttggccaggctggtctcgaactcctgacctcaggtgatccacccacctcggcctcccaaagtgctgggagtacagacatgagccacggtgcccggccctgttttgttttgtttttaacaaagcaattagtgtatctttttggctattagtattagcaatttatttacaatatttaacgagataaattgtaggcaaaaattcagtacaatttcaatagaaatatcccttttttttcccctgaaaatacagcagtatttgaaggactaatttctttaaagaagaataagacatgatctttgcttttaagttgctgaaagtgaaggtataattcctacatgtgactcatttaggagtgatatctttggcttctgttagtatggtgctaaatttggagatagacatgtataatctagttgataaagtcagtttcttagccctattgcacagtatttcaaaactttttattctaagtacctttttggttttattattagttttttataaagatggggtctcactatgtttcccaggctggtcttgaattcctgggctcaaaagatcctcttgctttggcctcacaaaatgttgggattacaggtgtgagctactgtacctggcctttattattattattatcattattattattattattatttgagatggagtctcgctctgtcgccaggctggagtgcagtggtgcaatctccactcactgtaacctccacctcccaggttcaagcgattctcctgccccatcctcccgagtagctgggattacaggcatgcgccgccacgcccaggtaatttttgtatttttagtagagacagggtttcaccatattggcaaggatggtctcggtctcttgacctcgtgatccgcccacctcagcctcccaaagtgttgggattacaggcgtgagccaccgctgcccagccctgtgttatttttatggtcatcaaaaaggtagcatttgaccaggtatttgactggtggctattatgtttgtgtgtgtgtgtgtgtgtgtgtgtgtgtatatatgtgtgtgtgtatgtgtgtgtgtgtgtatatatatatatataaaaaataaaaatatatatatatatacaaatacatacccattttagaaaattgggaaaatatagaaaagaaaaaattcaggctgggcatggtggctcatgcttgtaatccagcactttgggaggctgaggtgggcagatcacctgaggtcaggagttcaagaccagcctggccaacatggtgaaacctcgcctctactaaaaatacaaaaaaatagtttgagaccagcctggccaacatggtgaaaccctgtctctactaaaaatacaaaaaattagccgggtgtagtgagtggcgcccgtgagctgagattgcgctattgcactccagcctgggcaataagagcaaaaccccatatcaaaaacaaaaaaacaaaaaaaaagaaaaaattcagccataattacaccacccagagaggatccttattatatttccttctagtcctttcttatatacatatgtagatacattacatatacttttggatcttgtattctccatcttatttgtaaatagtattctacgtaatgacttcatatttccttggcacatgaatggtttaaatcacttttatacatgaacaaattcataaagtggatatttttcagatttagaatacgtttttgtatcagtgttacaaaaggaagtggtggcttatgagtaatatatatatttataaaatttatatttacttaaagtttcattgtagtttagcaggtttttaactttctttattactttacagttctgaagtttataggttaaacttagaacaaggacgatacctgaatcctctacaaactgatgctgcgtgagtattgttttagtaattctgctatatacattttgaccaggaggtggagccagatgctcagtttgttaacaagtaacataaactattgcaattaagcaaaactcccagcaacttagttaaaaagtactgttgaatttattctcagacaaaaaattcactgaaagatctggtgattactttaaaaattaaatgaaagctttttttcatctactcaactttaagtcagttaaaaatactcagtttattattattacttgtagtgttctttaaatttacattcatggttttgttttgtgatattttctcctgtggagaacttttgaattaatttggagtgccatttttaaatttttatgctctgctagcggacatttaaggtttttaaaggtttccttttatcatacattatagtctacacatatgtactatgcagcaaaaatttttaggaatgaatccatcatcatcatcatcacaacaaataatagtgataaacacagtaggaaagcactttgtgccaggtgttattcagtcattttacctttattatctcattttaaacttagaacagatttttgtggtaagtaccattttacagatagggcagctgaggctcagagaggtaagtagtttgcccaaggccacacaactagtcaagggtggaagctggattacttctcattgtgtatatgaagagcttgctgaatttctcgtattgctttgagaggatttttaaaggttaggtgaacatgttgtgataagaaccaaataaactctaatttttttttatttcacattgggtagaaatgcttttatttttattaaaaaaaaaacttgtagtagtaacttcacaaatgcattatattgagtgtcctctgtaccccagatactgctgaacgctttgcagtctttttcatttaatccccataacaaccccccgaggtaggtgaaatatccattttacagagaaagaaaatgagacttagaatgatgtacccaggacaagcctgtcaaggctcaggattgtcatggtgatagcgtgtgttcttttaagaatgttacctgccttggaagaaaataccttgaaaaatagagtgaccctttcttctcatggtagtggaatagtatttcagaaggaagtccctccttgtttgtcacctagcaggtagagtgtcaccctggggatcagaaactccagtgactgagccaagcacttaaccctttcataccttggtgttttccatttgcagattagtaagagagaatctgtgtgtcttctttctactcagaatttgggttgactgtttatttatttaatattccttccccactaaagtaggtgctaactaattcattctttcttactgctttcctgtgttagggagaataatgtttgtgacataaattcagtgcatggcttgtttgccacaggaaccatagaggtaagcatatgttgactttattttttagaatatttgttttatatttgattggaatttttatttaaagactgagttgcttgattccttagagcaggatgataatgaggtgatagcttgaacatcctgtagagtaacattcagtaaatattgagatgaatgtacacaacatttttcttttaaatgataatatctttgaatcaatgtccttcacacttaccaatagttttttgtagatttgcatttttcacttaaaataatgataaatactcatagttttaaaaaatgcaaatatgtcagaagcatgtaattttaaaaagtgcccttttataccttccagtcaccaaatcctacaccccagaggtaacacttgaatggtttggagtagtatcctttcaaattttttttcctaagtgctatatgccaatatgcatatgtgtacatacatattttttaaagtggtttaccaaactgaaattgtattctactgtagttctccatttgctttttttttttagacataacagtatataatatacatcttattggtacttataattacttacgatgctaaactaattttaaaaaaatttacaggccaggcgcagtggctcactaatcctagcactttgggaggccaaggcaggcagattacttgagatcaggagtttgagaccagcctggccaatatggcgaaacaccgtctctactaaaaatacaaaaattagccgggtgtggtggcacacacctgtaatcccagctatttgggaggctgaggcaggggggcggaggttgcagtgaatgaagattgggccactgcactcccgcctgggtgacagagcgagactccgtctcaaaaaaaaaaatgatagtttacagatagcattctgttgtttgtactataatttattaaaccagtttcatatggatggaattaatggttttttttttactcaaattatttttatgttgagagattaatgcagccacaaaaaagaatgaaagaatgttctttgcagcaacatggatgcagctggaggctgttaccctaagtgaattaagacaggaacagaaaaccaaatactgcgtgttctcacttatgagtgggagctaaccgttgggtactcatgaccataaagatgacaacactagacactggggattactggatggggaagggagggagggaggcaagggttgaaaactaactgttggctaccatgctcactgcctgggtgacgggatcagtcacactgcaaacctcagcattatgcaatataccagtgtaacaaacctgcacgtacccccagagtctaacaaagaagttgaagttgtattttaaaaaaagattaatatttgaaatgggacactaagtttgatctgacagatattatgtaaaactatgttgaatgtgtttgaatactgttatgtctaaatcaagctttctcttggtagtcaggttacttgagattaccaaggggaagttttacaagagtttccctgagaaaatagtttttagggtccttacagggcagtctaggctagacaccaggcaatgtgctaagagaagttatgtattagaacgtgctgctcttccagcagctggtttaagaccagcctaggacatgttgaagggataggaggtagggatgctcaaagactgggcttccggaaattccttgattattagcagcttgcagtttcataagcatagtcagatcaggcttaacaaattcattttacattgattttcatattacatctcagattttagtttcttctttagttcttagttatcataatattgtcaaactaaatgtttgcattttgtgctttttgaagtgcctaagaggggaggtttggcaatggaaatattcaaatttaggtaatagaaaatcagtgtgcttaaaaatacattttgtatttacactggaagttatctgcatacccattttgtgtttttggaatgcaacttttcttttttatgtccataaaatttattaactcattttgagaagacatagaagactagaccatttggaattacctgctgtagtttaaaaaggtttcccttcgattattcatctttgcaacatacctacttgtaataatattaaaagattaatgaggtcagaacctcctaagtatattgaagggtttgcttttaaggtagttaatatattaaacaatcttaaaacatctttgtttatgtttttgttttatcattacaaaatcaaatgatagacaagaacacaaagtgaaaagtgtaattcccttccaccctgtcctattcctgtttccttaggtaaatactgttaataatttgctgtgtatcctctcaggtttttctgtttgcacaagcatttttttaaaaacacaaatgttggctgggtgtggtggctcacgtccgtcatcccagctctttggaagtgcgagtgggtggaacgcttgagtccaggagttcgagaccagcctgggcaacatggcgacacctcttctctaccaaaaatccaaaaattagacaggcgtggtgcataccatagatgcagctactggggaagctgaggtgagaggatggattgagcctacaaggtggaggctgcaatacgctgtgattgtgccctgcactccagctgggcgactgaacaagaccttgtctcaaacacacaaacaacgacccctcatttaaaaaagtaaattgcttttttgtggacacaattctagtacatgtatattcacatcattctttgtaatggctaatactcagtttaaatggacgtactacagtttctccattctgtttttttttgagacagtcttgctttgtttcccaggctggactcggctcaccgcaatgtctgcctcccaggttcaagcgattctcttgcctcaggctcccgaatagctgggattacaagcacctgccaccatgcccagctaattttgtatttttagtagagacggggtttcaccattggccaggctggtctcgaactcctgacctcaggtgatccacctacctcggccttcaaaagtgctgggattacaggcataagccaccatgcccggcctgttctgtttttttgggttttttttttttttagacggagtctctctctgttgcctaggcaggagtgcagtggcacgctcagctcgctgtagcctctgcctcccgggttcaagcaattctcctgcctcagcctcctagtgtgtgggattacgggcatgcgccactatgcctggctaattttgtattttttttttttttggagacggagtctcgctctgtcgcccaggctggagtgcagtggtgcgatctcggctcactgcaagctccagcctcccgggttcatgccattctcctgcctgagcctcccaagtagctgggactaaaagcgcccgccaccatgcccggctaattttttgtattttttagtagagactgggtttcactgtgttagccaggatggtctcgatctcctgacctcgtgatctccccatcttggcctcccaaagtgctgggattacaggcgtggccaccgcgcctggccgggattcttcttttcattaaaaaaaattttccccagctttttatttttaaaaagttcacatctttgtaaaagtttagtgatatatatattttgcattttcttttcccataaaaatgtacatgtattaaaaatgttttttgaaccttttgaaaataagttgcaggcattatgatatttcttccctaaatactttaaaatggatttcttaaaaataaggactttttctatgaaataaacaatgttaatgtggtttatttttgtatgtgttttaaggatttcttagcagcttttttttttttttttgagacgaagtcttgctctgtcgctcagactggtgtgcagtggcataatctcggctcactgcaacctccacctcccgggttcaagcagttcttctgccttagcctcccaagtagctgggattacaggcgtgcaccacatacccagctaattttttgtatttttagtagaaacagagtttcgccatgttagtcagactagtctcaaactcctggcttcaggtgatcagcccgcctcggcctcccaaagtgctgggattacaggcatgagccaccatgccccgccttctacagcttttatttaaaattgtttttcatttgcatagggtagagtggagtgctgggacccaagaactcgaaacagagttggcctgttagactgcgccttaaacagtgtcacagcagattcagagtaagtagaaattaatttgcaatgtaaatgttcatcaacttttaatttaagtaatgtgtctatattaaattcaaataaattgctacaggatatctgaaattgtactttccatgattgtttttcataaagatcctctcctgtaaaagctcactagtgagtaagccagatagaatttctttccaaaatactatacagaaggccttatttctttagttgctgtacgattttattaaaacaattacactacaggaatttgtattccaattttgtagaatctagtgatagaaccaggagtccaccacaaagtccacagaggtgtgctttgaattctaaggtggaaggaagcaagtgtttttttaatattttcttgttcctgtttgcctaatttctacatttaaaccaatcagaagagttttcactattatacatccatttacagttttatgattatttcctgagaaatgatacctagaacctgaatttctggattaaatagcatacatgttttgaaggtttttggtacattgctaaattgccctacagaaaacataacctcaggttaaatgtctccctgcatgcccagagcatacattgctcactctcctcagcctgggacgtccatcacagcactgctaataataagtcttagaaagagcctgaggatattgattaaataaagcttagtagaaatagtagctgacagatagtgctttctatttgccaggtactgggtctaagttctttacatatattaacttatttaatacgacagccctttgctgtaggcactgttattgtatttattttatagatgaaaaaaatattcgtcaatggcatacatgttactcagcctttaggaattatgttgcagaagcatatttattactagggaaaggtggtccaaatgcgcctgtcagtggaaaagcgagccatactgttgactatagagtgttaccacattgttatcagaaaaacagtgaacacaagcatagtcataggaagaaggctgggtgtattccagaatgtaaaaactagagggtttttttttttccgatttgcttttaggtaattttattttttaatttttttttaatgcttagctttttcgtttttgttttccctacaaaccttagaagctgtcacttctaggtggagcccatacaatatgagaaagcagtaagtgtaagtgttggataggggaagcaggctgtcattatttgcagatgatgtaagtttctctgcctgagaaactcaggagagtaactgaaaatctataagaactaatatagaccaggcacggtggctcacacctgtaatcccagcactttgaaaggccgaagctggaggatcacttgaggttaggagttcaagaccagcctggccaacatggtgaaaccctgtctctactaaaaatacaaaattagccgggcatggtggtgcatgcctgtaatcccaagtacccaggaggctgaggcaggagaatcgcctgaacccgggaggcagaggttgcagtgagccgaggtcaccccactgtactccagcctgggtaacagagtgagactccatctcaaacataaataaataggctgggcatggtggctcatgcctgtaatcccagcactttgggaggctgaggcaggtggattacctgaggtcgggagtttgagaccagcctgaccaacacagagaaaccctgtctctactaaaaatacaaaattagctgggcgtggtggcgcatgcctgtaatcccaagtacttgggaggctgaggcaggagaatcacttgaacccaggaggcggaggttgcagtgagccaagatcatgccattgcactccaacctgggcaacaagagcaaaactccatcacaaacaaacaaataaataaagtgttaccacatcgttatcagaaaagcagtgaacacaaacatagtcataggaagaagactggatgtatacccgagtgttaaaactagggttttttttctgatttggttttaggtaattttactttttttttttttaatgctttgctttttttttgtttgttttccctacaaaccttataagctgtcacttctagtggaaccaatacgagaaggcaataagtgtaagtgttgaataggggaagcaggctgtcatttccagatgacataagtttctgtgcctgagaaactcaggagaataactgaaaatctataagaactaatataacagttaaataaattggttataaaatgttcaaaaatcagtgaccttgtcagcactatccagttaaaaaggttataaatggaaaaacattctaataacaacaaaaattgtaaaactcgataagaacatatatgggccaggtgtggtggctcacacctgtaatcccagcactttgggaggccaaggcaggcagatcacttgagatcaggagttcaataccagcctgggcaacatggtgaaaacccatctctacaaaaaaatacaaaaattagctgggagtggtggcacacatctgtagtcccagctactcgggaggctgaagcaggagaattgcttgaaccggaaggtggaggttgcagagagctgagatcatgccactgcactccagcctgggcgacgggagtgaaaccctgtctccaaaaaaaatatgtgaagaaaatgacaaaggaataagtagagaagtatatcactatactgaaagaaatgattaagtatactttgaagagtaagtgactaaagttgctgtgcatatgaggcttcgaggttcccacaggtgccccagcgcagttacaggctcaagctctaggtggcagaagagacctgatgatgccgacagccaacagccaggactctaggtcctgggccaagggcatgtggacgataggattgatagtgatattgtccacttctgactcatcgcctagcactctttccactggagatcattgcttttggtgctgattgtcttggttggtatgtgagaagcatattctagagtcgtggccatagcattcactctgtctttggtactttcagaggctctagggtccccatttgaggattagtcttttattttagctgaacttggctaattttaaagtggaaatggtgtacccatgtccaaacaaaactatgtcttcttaagtatgaaaggggatgtttctataaataccttattctggcttaattaaaatggaagaaagtagattacgttttgtatataaagtgtaactttgattatgaaagtttgaataaaattactatttacttactatttttgagacagggtcttgctctgttgtcccagcagagctccactgcagcgcagtggaatgatcacagctcactgcagccttgacctcccaggctcaagcagtctcttgcctcagccacccaagtagctgggacaacaggtgtgtgccaccacaactggctattttttttttttttaattttttgtagagatggtgtctcactgtgttacccaagctggtcttgaattcttggcctcaagaaatcctcccacctcagcctcccaaagtgctggtattacaggtgcgagtcatcttaccaggctgcagttaccttttaaacagaagcctagaaatgtgattcctcccccccccccccattagatttgaagtgaagactaataatgaacttgttacttggaaggaggtttggccgtatattcatgaagcatgaatattttgcttttcaggataaacagtttaccaacaatctctgctttgaaatttaatggtgccttgaccatggcagttggaacaaccacagggcaggtaaatatgtttaatttggaaaccacatgtaagttggtatttcagtggtgtgtgtatgtgtcatgagaaatacactgcaggaacagaaaatgagatcatactattttagccagaccagagggtattccagaatgctggattcttccacaccttgagaaatcttgactcttgccttggtcagtctgcagtgctgtggacttagagctgcagtgggataggcctgcaccaccacacctggctaattttttgactttttgtagagacagggtctcactgtgttgcccaagctggtcttgaactcctgggctcaggcgatccccccacccttggcctcacaaagtgtggggattacaggcgtgagccaccgggcttggccataggtattctcttgttagtggtttggaacagcatttttcagagtctatgcaacagaattctgtggtcagacagtcttgggagtctgccagacttttactcttgaagattgacagtgggtttcaatactgttttaatgaaggctctcaggaattcttgcagacaagaaatatgtttaataaatatttccaaaatttgtgtgttcaaggaacttttttttttttaatatagcatcattaactatagcacatgccatgagtggtcagcagaacatgcattagcagtgctagtctgaggagtacttctttctttccttcaaggcagagcctgtacacttgcctcctacaagaggtctgaaaccctgccttggaggatttactttctttgtcatcatgggctagagggcatctgtcacctgggacttaatcctaggggagctttcccaggcttccttgcctctagtgacgggtccgaagagattctcccttctcccaagaagtcatagccttgccaccaccatctgtcttgatctactaggactgttcctgattatgtctttcatttttgtttatatctgttgctatgacactgcctggtacataggccctcagtatatatttgttgaacaaattaaattcttatgggctttcattttttgttctttcttagtatgttcagtagctcttacaaattaatcttggggttgaattcataaaatgtatactctaaggattatttaagagatctttctggaaagaatctcaaatctcagcaccttgagtaagggtgttcattgtgttcataacaaagcgatgaagcaaatggctgccattattctcacttagaaatatttcctttgaagataaaatgtctagtttgtttaaacagaaataattttttttcaggttttattatatgaccttcgatctgataagccattgctagttaaagatcaccagtatgggctgcccattaagtccgttcatttccaggattcattagatctgattttgtctgctgactctcgaattgtcaagatgtggaataagaactccgtatgtatttttggttgaaattacttgcttctttatttgcaggtgttccgaatgatcctttcctctccctttccttttttatgtgggttattgggaaagagatactgaatatacatttgggaacttagcgggaggtcagttacttttggatagataatatccatatttagataagatactcatgattgctttccttctgttaagttttcccaattatctagaattggcatgcattttagatgttaagttaggtagagagaaaatagtggtttacaaaagttgatctatgacccgagaaaccccctagatattgagattccctcacaggtgtaggaaaagtcttcagagctactaattatccttccatgcatgttggtattattacatatctcaaattcatacttttcctatttgattttttttttttgagagagtttgctctgtcgcccaggctggagtgcagtgccatgatctcagctcactgtaacctccgcctcccagtttcaagcaattctcgtgccttagcctcagagtagctgtgattacaggtgcatgtcaccatgcccagctaatttttgtatttttagtagcgatggggtttcatcatgttggccagtctggtcttgaactcctggcctcaaatgatccgcctgcctcgacctcctgaagtgctgggattacaggcgtgagccacctcacctggccttaaaagctatatttcttaagaatattttgatggtccttctcctcagctctaaatgtcatttgaaatgtaacaaaatcctatattgctggttttaatctgtcttctgcttttcatttttcattttaaaacctaagtattttgagagaatagtaaagagttgatcaaataaatgggaaaaatgcattcagtatagctatgtttttaagagttctttgcatttaattcattagaaacttagcatttttagtttaaaaacagatcacttttaaaaaattcccatttgtgatgaagtcgggtggacggcccaccagcctgagcagttcgtgcctaagcgcaagtgcccgtctattccgtgggggctgcctgtgcccaggcacacacgctgcagacagcccctcacagttcagctgcctgttgagtctctggctttctgggctgttactttggttttttaaatttcattttgttaattcctgaagtatgggtcttacttggcttcttttccttttttctctggatctgtcctggagaccagagctgtgttctacatccctgaggccctcacctaattcataggttctggtgactttgtttatgttacagagaagaacataaagaaaagacaggctttcagtctttctaaattcttggaagaattgccctgatgattgcccaggaagtgtctatgctgtctgctttgttggctttgagtttgaaggattttgagggcttttttaaggaagattcatgatcttagaccagaactttctctgctctttttctggcaattcaaactaattgatgttaaaacaatatttatttttaatactacaaatgcatatgtttttattcttaaaaattcataaaacactggtaaagtagaagttatttatccttgacctggctttcatccaaccaaagggaaagactgttagcaatctggatgtatctttccagaccctttaacttctgcatagtttccatcatgtggattattatcacctttgacacctttttgtcattgttgttccgtgccattataattcctttccctttgcttcctggtttcccctcttttccttcctctttcagtgggaacttgagaagaacagcaggtagctgtgtgaatttcactgttagtcttgggttaggacttggccgtgttcttcatcggacacaaaccatcttgtctgtgctctaacactgctctttttcgccgtgggcacttagtccatcctagtgtcagactttgcataatgagttacaaatgcaagagctggcagaaattttcaacatcacttcttgaaatcatcacactgtaattgctacagtaaattttattttggcattttttttgtttcttatgactaaagacttcctcttgactaacacccacgttacttggttttgcctgacttgcttaccttgtttatctttctcatcacctttttccacacccaccttcttagcatctttttcttttactttccttctcttaatttttaaaagataaaacacttttccccaacagttaaaatagaaatggtttagccctaactacatagtaactaacacttaagtatttgtaggatttcattttgtatttcatatccattgtctcacttgatcctcctcgaaaccttgcggtgcaggcatggcagtgttgtcctcattttccatgctggccatctctctcctctgattggtttgttttcttttcttttttcctttcctttcctttcctttttcttttcttcccttctttcccttcttttctttcctttcttccttccttcctttcttttcttcctttctttctttttttttttggacagaatctcactctgtcgccccaggctggagtgcagtggtgctatcttggctgactataacctccgcctcctgggttcaagcagttttgcctcagcctccctagtagctgggattacagttgcaggccacgatgcccggctaatttttgtgtttttagtagagtcggagtttcaccatgttggtcaggctggtcttaaactcctgacctcaagtcatctccacgcctcagcctcccaaagtgctggtattacaggtgtgagccactgctcccagctgtcttccgatttctttcaatacaagttaagctgggtacacttcacagattatgagagatttttttttaaagttgatgcataattcaaacttcatcttttcttgccatgttgacattatctttaaaatgttgtaatttttcttttttttggacaggtcacttcttctccttaggcctgtttcttcatctataaaatgggattttttgataaattgataagataaattctctaagatttttaagaatttaaattttgtatttgaagtaggctattttatttctttacataggagtagatggttgagttacagcttcagtttgacattgccaaagttgttgttctttaacttttaatacttcgtttttgcttgctatttttagggaaaaatatttacttccttggagccagagcatgaccttaatgatgtttgtctctaccccaactcaggtatgcattctgtagtgaacgttcagtgagacaaataaaaagatgcattctgtagtgaacgttcagtgagacaaataaaaaggctatacttttttaggttttaaacccattttatttcttaagatagaatttggctttgtcagcacaattcttggatatttaacttacttagaagaattaagagcaggaagtggtgtggatgattcagaaaatggcactcttaatgactcagtgctcagcccgcccagctattagtggaacgtggtaacagcatacaggtaggaggcaggtgaagtgctattttagtgtgctctttagctcttttatgtgattagtaatagtgtgtggaaattgagggtagagatttggagaaagctagattgcctgataatacacagatggctcatgaagccataggttttgtaaattctaagttgtatgctattcagcaatttacatgttaggtttcaaaatttaacagtgcattcaaggcaaatctgtgaagaatttcagagtatgggagaaaaatgagaatagtttctactctgagggcagaggtacccagatcatcttgatagagagaagtaaggcagagcgtgagaactcctatcacatttgtgcaaagagtactttgacagcttgctggagagagagagcttttaccctgtgaccaccgagagcggagcagtgagaagattttgctttgcgttgagctggagtgccgagtgagatttggttaggtggagttggggggctgaggtgattctcatgggagagcagtccaagatgaccaaaaaggatgggcacagagggctcggttggggtggggaggagtgtcctgtgcctgagctgtggtggctctgggaaggctgaagtgggaggcagagagtggtgggtggtagagggttgggcatgatgtgctaaatgtcttgggctccgtgtgctgtcagagaggacttgttccgactgtgctttcagaggcaggtctacccactgtgcaaagggtagattggttttggacaaaagtgccttggaagtaactgatattctgagctgagatggggagcacaggtgagagagcaagtttggaaagattatggcttctttttctaacgtgtgaggattaggaggtgacaggacagtggcagtatctggcactatctggcttcccatcaaaatcatctgcacagctttaaaggtacagctcccttgaccttatactaggtgtactcactcatagtgtctatggaaagggcttagaaatgtgtggttttttttttttttttgagttggagtctcgctctgtcacccaggctggagcgcagtggcacaatctctgctcattgcaacctcttctcctgggttcaagcgattctcatgcctcagcctcctgagtagatgggactacaggcacgcaccaccacgcctggctgatttttgtatttttagtagaaacggggttccgccatgttggccaggctggtcttaaactcctgacctcaagtgatccgcctgcctccacttcccaaaatgctgagattacagatgtgagccgccgcgcctggccagaaacgtgtgtttttaacacacttcccggtggattcttaggcggcaagccctgaaccgatccgcagacttgtgcttggggggcgtgtctggcgtccagtagaaaatgtggtcttggggtaagcaggtctgtagatagaaagttttgcgattatcccagaagtggtgggaatgaatgagattactgatagggaaagctgggagtgagataagaagtgagcaggagctggttcatttgggagaatgacggggaggagccagctgagaaaccggatgggaatggacagaacgacagtgccaggccccacggtttttgaagtatggaagagattcagtgggcactgcttagcaactactaaggattacagaagttggggcaggaaggaaagaactaagattgattgcatgctgctgttatcaatctggatgatggatgctgtaatacaaacttatttaatcttttataactgtgtagtcagtggtccatggcttttttttttcttttttctttctttctgtttttttcttacctcttaaggggtcagaaaaattgggtaattcattcagggttggtcacccagctggtgtgtggcagagcctcatttagaacccagccttcctgtttctggtgcccatgctgttttttctttttcttttttttttttgagacagagtctccctctgtcccccaggctggagtgcagtggcgcaatctcagctcacttcaacctccccctcccggattcaagcgattctcctgcctcagcctcctgagtagctgggattacaggtgcccgccaccacgcccggctaatatttgtatttttagtagagacagggtttcaccatgttggtcaggctggtctcgaactcctgacctcgtgatctgcccgcctcagcctccctaagtgctgggattacaggcgtgagccactgcgcccagctgcccatgctgtttctaattgcacactgctctcccaagaaagatgagaaaccctggactttataatttgcatttcatctgtaatagttgagagaattttattataatcatgggagtaaagtgaaattctggtgagttcaggaatagattgcagctgaggatgctgggtcctagttagggtattgaaatgacctacaccagggtctcggttaagtaggtaagtgagtaaatcaggtggagctgaggttggggcaagggtgacgagcagggatagtgcgactgggggagtgacagtttgaagggcacagagagttgggagagaaagagtcttaccttgggctgtacagtttggtagccactagccactcgtgggcattgacatgtactgtgagtataaaatatacattggatttaaaagacattctacgaaaaaaggatgtaaaatagatcattaataattttctattaattacatgttgaaatgaaaatattttagacctgttggattagtaaaatatattaaaattaattttaccatttttaaaaatgtggctactaaaaattttaaaatcacatatgtggttcacatgctctttccattggacagtgctggtctaaactgggagagcttcaacccttgaggatgctggtaaggtttagtagtgcttgtgcctggcccagtgtagcggggattgttgagcctggtaggctgcctcagtttttccattgtaaccaaggatatagaagcccaaagagacacctgctgaaatgagtgccaatctgttggcccccgcaggctgtgtgcctaaacagcttctccaggaggcagggctggagggtggactcttgtgggcaacttgatttctcaggtcagtttttgtgcatctcttcccccacctttaatggctgtaaagatctcttaacccacaaagggtgtgactacttggcaaagaagcctctttctgagaaatactcaggctcagactgttgaggaacccattcttgaaatgccaccactgacgacagtggttggaatcacaaggacaaggagaggagggaggctgatgttagcagtgcatgttgttacccaggtgactgctgaggaagagacttaaaatggattgagagggtgctgataattcaactacgcatctctggaatgctgattttattttttcgcctggtctgtatttatttattttttcagagacagggtttcacattgtcacctaagctagagtgtagtggcacaattatagctcactgcagccttgaacccctgggctcgagcgatcctgcctaggcctcctgagtagctgaggctacagatacgcaccatcacgccggctctcccctggcctcacgataaaaatttaaatgatttgtcatttaaaatggcataaaaattgtaaaaataagcatgcttttaaatgaaatttaaaagtgtttctctctgggaaaaacgcccaaaacacttatttaatgaagattgttgtggcctagtgcagtggctcacgcctgtaatcccatcatgcctataatcctgaggcaggaggatcacttgaggccaggagttcaagaccagccttgtcaacacagcaagactctgtctctactaaaaataaaaaaaattagcaggaagcagtggcactgtgcgcctgtagtcccagatactctaagggctgaagcaggaggatcgcttgagcccaggagtttgagtttatagtgagctgtgatcttgaaactaactgtactcttgcctgggtgacaaagcaagacctaaaaaaaaaaattatcttgctaacattttaattgtagaagcatttatagcacagtgattttaatagttacttattaaagtaatatttatgaagaaatgtttgacaatttggtcagaaaacattcttaatgagtagcattttaaaaagtctatttggcaaactgacctataggccaaatccagtccaccacttggtaatttgcagcctttgagttaagaatgggttttacatttttaaatggttggaaaaaaaaatctaagaagagtaatattttatgacatggaaattcaaatttttgtgactgaaattcagatttcagtgtctttcagcataaagttttatgtgaacacagccacccttgttcgtttatacattgtccatgtggcttttgcagcactgtggcagaggtgagtagttttaacagtgaccaggggggctgcagagcctgaagtgtgtactgcctggccctttacagagacagtttgctgacccctggtccatattactaatataaacaaaaatggtcactttatccacagtatttaattatgaagaatttcaggccaggcgcagtgtctcatgcctgtagtcctagtactttgggaggccgaggcatgcagatcacttgaggtcaggagttcgagactagcctggccaacatggtgaaaccctgtctctaccaaaaatacaaacttagctgagcgtggtggcaggtgcctgtaatcccagctactcaggaggctgaggcgggagaattgcttgaaaccaggaggcggaggttgcagtgagccgagatcatgccactgctctccagcctgggcgacagagcaagactctgtctcaaaaaaaaaaaaaaaaaaaaaaaaaaattcaaacatacagaaaagttgaaaaactggtagaatgaacatctttatattctctcctcaatgtttgttattgttgtcttcaccataattgatttatttatctctgtgcttctgtggttgttgtggtttctttgtggaatcactcgaaagccagctgcagacatggtggcactcacctgcacccagggtggcattgatctcctgaaaatcattgaaattattaggtcccttattgtgcctaataaaaatggcagcccttttctaatattatcttacatccagtccattttcaggttttcctaattgttccccatatgcccttttttagttaggtgtggtttttttgtttgttttttgtgtttttttgaaccaggatataactgaggttgtgtgttacatttcgctgttgtgtatctttagtttctttcaatccagtatagtcccccacatctttttcttttcttctccatgacgttgacttttcaaagatcaggccagtggtctcagaatatccttcatcctcgatttatgtgatttttttttctcgtgatgttgtttaacttgatcctctaccgtgtattttttctaaaatagaagttaagtctaaagacttaattaagtttagattaaatttggggcaagagtaatgtgcaggctgctgaggtctccaggtcgttgcagtattggagaggggtaaggttgatcccattgttaagtgatgtcgtcattacaaagtacagtttcttgcaaaccagcaactttaagcatgatgttttggacaaaggaatgactgttactatctaataactcgtaagaggttaatcaagagtagaaaagctagccaaataatttatttcataagagagcaggcagaacaagacccgtaggcgccccttctttgtggcttggatctgagtgtggcggatgattgcactccgcttttccttgctttcccacaccttttcctcccgttcaactctttgtgtctggtgcttaatcattgtgggcttaatcatagtttagaaaagctgaaactgtctttcttttttcttttcacttactcattttggagtaattgaagcataatcatgattatggttttgtaatatttttcttataccaaggctgctcagtatattgggaaatggttctgccttcctgccttgttcagggccctgctcctatggctcatcagccacctgtacagtgagcagctgctccatgccggtcagggcacttgaagagacagcacggctctatgacttgggtgtgcatcagattcatgacacggggagcttgtaaagcttacgtgtgtcttgagtcccactccagacctgtggaatcagcatcggtggtttcagaaccatggtagagagaaaagaacaggggcactgggctcaagaaagatccaattcaggcttaatagtggtagaaattacccaacctcggaattctcacctgccttacaggactgttgaagactacctgtactgataagtgtgaaatagccttttattccgtcagtgccttctaaatacatggaaaactgttagagccatctataaatatctttggtgccttgtatagtaaactcaaatgccccatactttcatctgaggttctaaatagggcaggagcgcccctgccagtcccctttggcacagttctgcgtgcacagcctgtctcctctgagctgttcaaggtggtgactgatgccatatgtttttgcgcagcacttcccaacacgtgtggtgaaggaccaggattttggttttttgttttgtttcgaattttctaatccactgcacgttgatacgtctgtaaaagacaatacaaatgaattactaggaaaatgatcacacatttggttgtcactgcagtgttgaattgcaggtttctaaatgcttcttttcaatttctgcacttatttcctggcctggtaacagtttgcagtctgtcactggggacacactttgagcagctgtagagcactgtgtttgtgttgtgaacttcagtgagtcctttagtccccagagcacatgcagatgagtactgatttgtgcatgtttctggggagggcactattttgtcaaattctcttttattgtattattacagcgtacagtgcactgcatactatacactatagtgtactgggtcatattggaaatgtgttcttttgactccaggtgctgatatcttttccttcctttaaaaatgtatagttttattgtggataaactacattaaaataaatttaaaggaaaaaagtcctcaatgccataatctctttacacgtactgtcacgtactattactgtcttcatgggtgaaaccatattaattctgtgttcatatgttttaagttgtcctcacactgtacttacggttatcttttgcttttcagtttgatgttatattaaacacatctttcacgttgccatgtggtattcatactgacttttttaaaatggtttcttacttgatcatgcaggaggtcttttaattttaccttagttgatgaagtgtcagagtcccatgttatgagccttggaattggtagactgtcagtggctctacttactagctatgtggtggccctgagcaagggaggtaacttgctgagaatgtgacttgcctggcgcgatgctcatgctcttctcttctcctgccttgatcatcttaatttctgctgaactaaggctttctttcacaggtttatttttctgtttctgcctgttagaagctgctcatactctttgggctctatgatgttctttttctcattcataattgctttcagccctgaccctcctcacttgagtttggtagtagacctgcttgtatcattagccgtatgtggttgtgtgagatcctcctccatttttagaaaacagtctagctgtgtccagtctgaatttttttgtgtaattacattagagccctttccgtggtttgtttggtaggtggtgttgtatttcattgtggaatgttcattgttgagtgttcagggttgagccagtggagaaggcttaggagaggtctttattaggaaccttccttttggttgtgaagatgtggcttctgtctccagaactgctttaattatgtccaaaggctcctggagatctttcagcagtgttgttagtggagacctaggaagcacaatcagcagaggcagtttctgtccatcatgacctcggtgaacgttgtttggaaggccagaaaaagtgctaagatgaaagattctacaagagttacaagctatgaaaaacagctctgactttgttttggtttaatttagacattattcttgcttttttagacttcattaggtgcttttagatgtttttacggggtgtgtgtgtgtgtgtgtgtgtgtatgtgtgtgtgtgtgttttgtgtgcatatatttttggtgacctgttggtcccagttcagggctagctcacacttctgagttattggcaagacgtggttttggtaagatagtatcgaggccagatgcggtggctcatgcctgtaatcccagcatgttgggaggccgaggcgggcggatcatgaggtcaggagattgagactgtcctggctaacatggtgaaacccccctccactaaaaatacaaaaaattagccaggcgtggtgggcgcctgtagtcccagctactcgggaggctgaggcaggagaatgacgtgaacccaggaggtggagcttgcagtgagccgagaccacgccactgcactccagcctgggcaacagagcaagactcttgtctcaaaaaaaaaaaaaaaaagatagtattgagttcctgcttgagtggtaattgactctattcactcagcatctcatttctgtaatagagtcaaatatcatcacttttacaaacttttgtgttaataaaaggaaaggcagcaaaaaatatttttaaaaacagaatctaatcattgcccttaacatttggtatattcatttatcattatgtgatctgataatctaaatgtcttccctctgtggattcctcttgtatcttacaaatagatttttaaaatgaattcttatttagctgatctgtagaagtctttatttaaaagcaggcgctcttgagtttgactttagctttaacattctctcacgactggggcatcagtccctctgagctttattttctgatcagtaaaatagggctgatgatacatcttctttgagagggttgttgtatgttcactaagatagtatatgtgaaagtgcctagatgattatgaaggactggtcaaaggcttgctggtttcagttttatttaaagtgcagtggtccagagcaggggatctgaggagttttgatgtttgcatattgccatgttggagctgcttcagaacacttgtggggaaggagtatgttgcaaaaatggcagagaaaagggaacaaaaccgagatatttgaatactttgatactaagtagtttagtaccaaataataatgtacttataggttgctcctggggttatagagaatcctttattgaatgccggaaagttatctctttcttcagttttgctttcttatatgctgatcccaaggagactcaattattaaccaccctgttggttcagtctgttataattccctgtgagggagtgactgtgctgtagtcagggctgttagagtccctctaggactttctggtgtagatgataacaaaatgtagacattttgttttgcagtcagttttgtaaaagttaggaatttgctttgcaaaagcaaagcaaatttgttctggaaaattcgaatttgttttgtaaaagttaggaatttgctgtgacattttgtgggaaatactatactttggttcactgactaacagaagttcctcaggcatttcagaatggaaagcaaatagaaaagggtactttctttttcctatgcattgacctttttcattgtatttatttttaggcatgcttctgacggccaatgaaacccccaagatgggcatctattacattccagtaagtaatacaaagaggagtttcagtaaaaataggacaagcaaagatactttttattatttatttaattttttgagacggagtctggcgatcaccgatgctggggtgcagtggtgcagcctcagcccactgcaacctctgcctcctgggttcaagtgattctcctacctcaacctcctgtagctgggattacaggtgtacgctaccacacctggctaatttttgtatttttggtagagacggggttttgccatgttggctggggtggtcttgaactcatgacctcaagtgatcctcctgcctgggcctcccaaagtgctgggattacaggtgtgagccaccactcccggccaaagatactttttaaattggatgtattgaggaacctgggtctacatgtggctgtgtacattagacacagtggactcacttttgggttgaatttgctttctggagccagtcaattcatgctcaaacattcttttatgggaactgtttaatatcatgttaaaacagacattataaattagtatttattcttctgatttacatttattttttgtttccaagtatttcagaatcttaaactttcagctgttagtgatccggaggtctaattctgaaaagtctattactcttcaagtcatctcactatagtttgtttcttttaaaaataagttacatatataaattatcatagatcatcctgatcagggatgacatgtagtttgccaaaaaaacctttttttccctccttaaataattcttctcttaaatagccagaagctcccacccttccctttaagtttatagtaaaaaatgaagcaaggaaatacgatttcataagcagaaaaacacatagtataaagttggcattagattactttatactcagcagacatctcccttacctgagatttgagaagagagtagagtgaggggtactgaagatcagaatctgagggaggtgaactctctgtaaccactatcatcttgcaggtatgaaaattattcctgtctatgatagtccttttaaaattgctcagttatgtattttcacacataaaaaaagcatgctgcttgctgttgactctgtggtttcgggatactgacgtgttgttgaaagcacttagagatatttcgtttggttggtagtgaaatgaaggccgttcaaacaggaagcattttggttttcctaagttaccatttgttccttttcccctggactcttgcagatactgcattcatattcctgtcaacttatccatctttccttgtattcacttgttaataaatattatggactacatcaactgtgtgttgggaacgatgctgtatgctggcagtattacagcatccagggtgctgcccttctctttgaggagttactgttgggaatccaacaagaaagtaggcagttgccattcagtgtgaggagtgctaccagggtactgtggtgggagcacgtaggagagaccctgtacccactgagggcccaggagctgatgagaagtgtggttggcactcagggaatacttcccagagggagagactttgaaggagggaccgaaggatagctgcgtcgactgggtgaaggggtggggtggagtgaggtgcccagtgggagaagggtttttttttccttttcagtcgactttcccaggttggacagtagatcggatcttgacagtagagtgggtgcagagctgcgggagcaagtacctcccatggctgagcatttgagcctgtgggggcaggtagaaagccaggttaggaggggtcttgtgagccggctgtggggatgtagggcagggagtcctgacaagagttgtaagcggggggataggatcagacctgtgttctgaaaagattacttttgctgccgcaggggaatgcattaaacaggctctaatctggacgcaacaagcacaggctgtggcagcccacaggagagatgatggcacctgcattacctgtgccaggctccctttctagtagttgtggctctttggggttctgggataatgtgagagaagtctaatctggtaggcagtacttgcagacgattcatccttgaattgcctggtggcatgtctcagaggtgttcattgatagagagctgtatagatcacaagaatgctgccctcagaccagcgttacgtagttttctcccagtttgtgcccctttggggaacattgtcaggagaggcagaataaatcagcttgcccctaaccttttcatcatgagaaaggtctctttcatcttcctcttagaagtgcttattgtattttgatcactacagcaacatggacagcaagtgcctgtccatgccttggatcttagatcccttctgcatgtcaaaagtagatagaatcaactagtgggcaggtgaaaagcactctcagtgtggagtgctgcttcgggaggtctgcctagtagaggaggagatgtgggctggagagccgcgttgtggagaggtggggaggggcagtcctgaagacggttgcagtgaggccaccttacaagcctgtgtgaggatggtggccatgggcatagaattgaaagggttgttatggttgtaagagacttgaaattgatgagtgtgggaagtaaggaataggaaaggaccaaggatgacaccccggtttttgcttgggcaaatgtgcagataactatgtcattctgagtccaggaagaggcaggagaatattaaacattattttccctttggtattttctgcattttataaaatgatcttttaaagaaagcaaaacagcttttttgttcatgcaaacaatgtatgcgtattcctatttattctaagtgggttacaaggtatatgaaaataaaaaccagctattccctcttgataatactataactaccattaatatttggatgtattgttttttagttatatttgtgatgttatgtgtgggaagttgtatttttttttttaagctttaatgtttttttttgagacggagtttttgttgcccaggctggagtgcagtggcacaatctcggctcactgcagcctccacctcccagattcaagcaattcttctgcctcagcctcctgaggagctgggattacaggcatgtgccaccacacccagctaatttttttttttttttttttgtatttttgtatttttagtagagatggggtttcaccatgttggtcaggctgatctcaaactcctgacctcatgtgatccacctgcctcggcctcctgaagtgctgggattacaggcatgagccaccgcacctggccctaatttttgtgtttttagtagagatggggtttcaccatattggccagactggtcttgaactcctagcctcaagtgatccaccgcctcagcctcccaaagtgctgggattacaggcatgagccccaaagttgtattttatatacaaattggttcctggtttcttcagttaaccttggaaatattaattctaaggtactgcaattacctaaaacatttttagttgcctctattatatgtcattggctggtttatgacatgtctattatcttagaactgtaagagacccattgtttacttctgattctctggatcagtttcttagggtgggcgtttttgttccaagtaatggtgactttaattagcatgagtatgaggggctggtgatgagaagaagtatgaagtatgaagtgtgaggggctggatgatagccaggtgatgagaaattgccttcttgacaaatgttagcttatcttataagacctttttagtttcaactttctacctgagatttaacagaaagctgtgaaaaaaacatccagagagccctctcctaggtgagctgcatatggggacagtgtgagcagaagttgcttttgctaagcgaagcattatgctgaaacttggacttcagtgttcctttctgacctacctttctgccctgctccctcccacagtactgagtgatattttatagcaccacttgtctttacttggaaactgctctttgtaaactccttcaaagcaaagggagagcccaggggtctgaaagcctgccatttttcataagattttatcaaacgtaccaagttgacgtttggcaggaaggttcatttgaggcctatagaaccaaagaaatgtgtgtttaatgtatgatccatgccaagtttaggaagcctggactgtgatttgtattaacatcttataaatcaggtttgaaaactttttccctccctctttggggcatactgaagatgaaggcaacttagtgttcttttagcttgttaattttttgcctatctgatatcatctttcttgagtaattgaaatctttataaactaatgcagttcctgatacaccaccttctggcacttagatatctctgtagccagcttgtcctttgagaccaaatgggttgtctgcagcccctgtcccattttctcagttctttccttattttttatttttatttttatttttttaattctctcagagaccaggttctattgttttgtttgtttgttttctccagggtctaattcgtctgcagcttcagagactaatgccaagaataatttttcaagcttgctttttcctctgaaacataatttaatcttaggttagttctttataattaacatccttggcaactatgtagacttcagagggaatccaagtcccctatggcacccaacccaaaacctttctgcttaatggtgtttctgttggaaatgctcctgaattccgagcccctagcatatcagggcactcctgcagccactcattgcttggtggtggtggttggggtgtgagtgattgcttgctgcttggtaatgtggatgtgtaaacttgaggaaaaatgtaggaggaaaactatttgtttgggaagctgtttgatttagatggagtctcgctctgtcgcccaggctggagtgcaatggcaggatctcggctcactgcaagctctgcctcccggcttcacgccattctcctgtctcagcctccccagcagctgggactataggcgcacgctgccacgcccagctaattttttgtatttttagtagagacgggatttcactgtgttagccaggatagtcttgatctcctgaccttgtgatccgcctgcctcggcctcccaaagtgctgggattacaggtgtgagccaccgcgcctggcccaagctgtttgatttagaagaataaaagtaattcagttggccaggcatggtggctcacgcctgtaatcctagcactttgggaggctgagatgggcagatcacttaagggcaggagtttgagaccagcctagcaaacatagtgaaaccccatctctactgaaagtacaaaaattaaccaggcgtggtggtgtgtgcctgtagtcccaactactcaggaggctgaggcaggagaatcgcttgaacctggaaggcagagggtgcagtgagccgagaccacaccagtgcactccagcctgggcaacggagcaagaatctgtctcaaaaaaaaaaaaaaaaaaaaaaaaaaaaggccaggcacggtggctcaaacgcctgtaatcccagcactttgggaggccaaggcgggcggatcacgagttcaggagttcgagaccaacctggccaacatggtgaaatcccgtctctactaaagagacaaaaaatcagccgggggtcattgtgggcacctgtaatcccagctacttgggaggctgaggcaggagaattgcttgaacctgggaagcggaggttgcagtgagctgaaatcatgccattgcactccagcctgggtgacagggtgagactctatctcaaaaaaaaaaaaaaaaaaaaaaaaaagggaattcagctataagggtatgtgctttgtttttgtttttttctttttttaatgtcactatttaagatgttataaagaataaatacattactgcacccagctttcaagaatggcagttaggtactgttacgttacgttacgttacgttacgttacgtcacgtcacgtcacgtcacgtcacgtcacgttacgttatttttgaatgagacagggtcttgctctgtcaccctgtctggagtgcagtgacgtgatcataactcactgcagcttcatcctttggggctctagcatcctcccgcctcagctttgtgagtaggtaggactacaggcatgtgccaccaagcccagctaatttttatgctgtttttttgtagagagaggatctcactgtgttgccaaggctggtctcaaactcctggcctcaagcgatcctcccacgttggcctcccaaagtgttgggattacaggtgtgagtcactgcacctggccagttattttattttcaaacattttcttaagaaactcctatattatttctattaaaatattttgactgtttaaaataaaacactgattaaatattttaacatttaccatttaatttaaaatttggaaagtactcttggagcctgcaaatgaggcggttaaaaacatgaagaacccttctaacttgcactagtgcttctgcgtctgttcagaatcgcactggagcttatccagcagttcataaacccacaaaactctgtcttcgcaaatagaggacactatgtgttaagaagcataaggcctcaaaaatacataccacacagcttcacagaggcacgcaaaccaaaggaaatgcacaattggaagccacattttttggaatgtaataaaaggttgtttagtgaatgtttctaagcctctcagctgagtaggtagcacactccccgcagaggtgaggccttctgacgccatcacagggttcaacgctggtatctcctcagggcttcagtcactgggctagggcagacatctgtgctcctgcacctgtaaagatggcaaggcagtaggtgctgcagaattttaggggttgtcagggagatgcttttgaaatcattatagctttgggaagtcagttttagggaaatggcatggacatttttctagtaaatgtatgaatatttgcagtctggcagatttttttcttgctcaatgaagaaatacaaatagatattatagtctttttctcaggtttttttctgtaagggtttttggttttagtgtgtgtgtgtgttttttttttttttttttttttttttgagacagtgtcttgctccgtggcccagattagagtgcagtagcacaatcaacctccatctcctgggtcaagcgattctcttacctcagcctctcaagtagctgggattgcaggtacgcaccaccacacctgactaatttttgtatttttagtagacatggggttttgctgtgttggccaggctggtcttgaattcctggcctcaagtgatccacccatctgggcctcccaaggtgctaggattacaggcgtgagctaccacacccagcctctaagggttttgtgacaaaaacaaatttaggtgcaaacaattttaacttctgtctgtggtgaattgaatttgttagtctagttctaaactccatgactatgtcaatgactgttgtctgttagagaggtacttatggatactttttaatcatcgctatgtgatcttcttcctatatagatggtatcttttttcaagttcagtatttgaaacattactgttctggtgtgttttggcataattttccaaagtcttaagaacacagccttactcctcagcttcattaagaagatacttttttttttttctttgattgaaggtcgcactctgtctcccagggtggagtgcattggtgtgatcatggctcactgcagcgtcacaactttctgggctcaggtgattttcctacctcagcctctcgagtatctgggactacaggtatatgccgccacacccagctaattttgtttggtgttttttttttttttttttttttttttggttttttgtagagacagggtttcactatgttgcccaggctggtcgccaactcctgggctcaagcagtcttcctgtctcggcctcttagagtgttgggattgggattacaggtgtaagccactgtgcccggccaaagatgccatattttatcagctatccagagtatatgttgttttagtttaacggtagatttgacagtatcttgaaaataagtgtcaaaaattcctggatgggccaggcatggtggctcatgcctgtaatcccagcactttgggaggccgaggcgggtagatcacttgaggccaagagcttgagactagcctggccaacaaggcgaaaccctgtctctactaaaatacaaaaaaatagctgagcatgctttggcacgtgcctgtaatcccagctacttgggaggctgaggcatgagaataacttgagtctggcagacagaggttacggtgagccgaggtcgtgctaccgcactccagcctgggtgacacagactctcttaaaaaaaataagaaatacatgaaattcctagatggacgagtgttttgctattttgtctcttaatatttttattttgtcttcctatattataaaagtaaatgtaggagaccaacaagtgcttgtatttgttcagtaaggatatattgagtacggtactaggctgcaggaatatgttggtgaagaaaaccaacatgttctctattgtacactcaccgcccttgtgagcttacaatctaggtgaggggtggtgataaacagatctgtgactaagcgctgtgaaggaaggcagcagggttcagtggcttcctacgcattttccctaagtcaagggtcaggcactttgtatcagtctcttttttatgtagatattttatcagcccccttcttctgtgtagatattatatatagatttgtaaaaatctcccccaccttcatcttaaatttgaatttcagggttggagacttggtgttttctttgccttatgatcatagcacatatctggggcaaaatagtgaatgaccatatttgtcccacaatctctggaaacaaaagagaacagtagagagaatgttggccgatagagaacgtagaggttgagcctctataatccaaaaatctgaaatgcagacgctccaaaatttaaaactcttttgagtgccaacatgactccacaagtggaaaatccaaacatgagacttaacctaaagtctgtttcctgccaaaaattattaaaaatataaaatgtttaaaggtataaaattaccttcagtctgtgtgtataaagtgtatatgaagcatgaatgaatttcatgtttagacttgggtctcatcccaagatatctcattatttttatacaaatgttccaaaagccaaaaaaaaaatcaaaaatttaaaatccttctgatctcaagcattttagaaacaggctactcagcctgtattgcttttcctggacagacgtgtacagtcatcctccctttctccttgaacatacatctcatatgcacatcattttactttatctccaagtggtatttagaaacacagttgaccaggcctccttaaaactctgtgcccagcttctagaaggccacattctcctgggattccttctttcatctagttatctcttttcagtcttcactggctcctcctcctgctgataacgtcctagacttcggatcttgcctctctcccctgacctctgaatgttagtgagcgctaggacttagtccttgtctcttctttatttatattctctcccagggagcttgtttatgcctaggctttatataactaggctttatataacagctgtgtgttaatgacgtccaattttccctctccagccttccctctgagctacagaggtacatatccaccagtctactcggcttctccacttggatgtctaatagcacatcctgtttaatgtgtctacatcagaacttctgatccagctccccacctgcaccccacctgccagggtctccatttcagctgaagccttgttgttgctcactcggctgtctaggcttagagcgcaggagccatccttgtttcctctcctctccacttcatgcctcgtcatccagtccatcagctgtttgcagattttgttccacatccagccatttctcagtgcttcccttccatcaggcctctggattactgtaatactggataactgatctttctgcttctgcttttgtctctcttgtaacctattttccatgtaacagccagactgatgtaaaatattaaaaatataaacaaaacaggcccagtgcggttggtcacacctgtaataccagtgctttgggtggctgaggcaagaggattgcttgagcctaggagtttgaaaccagcctgggcaacatagtgagaccccatttccacaaaaagttttaaaaattaaccaggtgtggtgacatgtgtctgtagttccagctacttgggatgctgaggcaggaggatcccttgagcccaggagtttgaggctacagtaagctatgaccatgctactgcactccagcctgggtgacagagcaagaccctgttgcttaaaataataataataaatatatatatatacacacacacacacacacacacatacatataaacaaaacaaatataaatcagattgtgttactcttctgcttaaaaccttccagtggctcattattttgcttacaacttgaaaagtcttacataatagaaaagcagaaagagactaaagaatcagattctgttttcttctcactcaacagagaatagatctctattaagcattaatctatttacaaagatcaccaaatagtcagactgttaaaccaaatcctcagccactgccaccataaatggggaataacttatgggctgttaaaccaaatccccagccactgttaccataagtggggaataacttatgggctgtatattaataatatatcaatatataattaataccaatgttatgatacattaatatataattaatatatcaattatatattacataagcattattagataagaaatttaaaattagagccttttgcggtggtacccacctgtaatcccaactactcaggagtggagaatcacttgagcccagttcaaatccagcttgggcaacatggtgagaacttgtctcaaaaaaataacggaataactaagtaaaataaaaaagaaagacagacacagccaagttctgctgttcatttggattcaccccgcgagccaaggacaactgtgcttggatttcaggagcccaagtatgttacactctgatgaggaagttttcctggttctgtcaggtgagtgcatcaggtatcttagtgagacctccaaaactgctaaaagataacttccccaaaacatgaaatcatgattctcatatagagatgaaataaatacatcttaaaattttaatttaggcctagtgcggtggctcacacctgtaatcccagcactttaggaggctaaggccgaaggatcacttgagcccaggagtttcagactagcctgggcaacataaccaagacactgttgctattatttttttaaataatattttaaaatttaaaaatttcacattttaatttaacctgtaaattaaatgagggaaccaggcccatggttaaatcaaaaggtaaaattttaatttaacttttaaaaggaaaagtgtaaaaaaggacaaatttacatggaataaagttatattgaattgggaatgtgcaagtagacacaaaatggtctattttggactatttggggccttttccaaaggtataaactgtccaccagacataattcatttgcatgtctatagacaattattttgcattgcttccagttacttacaatttgcaaagttgtaaaataggtcctgtagaatgagaatcagatgatcttgcagggtgtactctagactggggtttgggaaactacacaccagctgtctgtttttgtaaataaagttttattgaaacacagtgagcccattcatttatgtattatctatgcaactttctgactataatggcaaagttgagtagctgtgacagagaccatatggctcatgagccctaaaatattttctcttcgtttatttacttctttacgtctatatttccccattgtaatgtaagacatgaatgcaggggcgtcattttgtctttttccctgttatatcctcagcacctaaagcagtgcctgtcatactgtaggccctcacttaatgggtgtggaaaaattaatgagcacacaagtgagagtgacctgattactgcaatttggagcgtctttgataatggttgtgtactttgaccatggctggtttgcagtgcttcttgaccgtacttaatgccagattgaaattttgcatttgcccttttctgctactactattaaaatatagaaaggcactctgggaggccgaggcgggcaaatcacctgaggtcgggagtttgagaccagcctgaccaacatggagaaaccccgtctctactaaaaatacaaaattagctggatgtggtggcacatgcctgtaatcccagctactagggaggctgaggcaagagaatcgcttgaacctgggaggcagaggttgcagtgagctgaggtcgtgccattgcactccagcctgggcaaacgagcgaaactccatctaaaaaaaaaaaaaaaacagggagaacatggttcatgtgtgccagagtataattttcatacagtaggattagcatcagttctttggctctgacagtgccttcttgtcagccacatctgagaatggtggtatgatgcaatcgttgtgtttgggagtgccaacaaatttttaaaagtaataccttgtccaaaagatttaatagtgattctgttaagaagataggttaattaaacttttttttcctataaaaatccaaaaggagaatatgaaagcaagggcatttagcttttgtcttaatttttttggaatttgtgcagaagttggctttgcatctagagtatgacagccttattgtatgttttaaagattgaaaagaatgccttttgtttttctctccatgcttttaactggagttgctgggagtgctgtacacgtcattccctaagatttgggtttgaatcaggaccacgattggtccagctgatgtatttcagttcaaagccaacaatgtaggatcatttatgtttactaaattgatattctggagaagtccccagtaagagatctctttgccccattagtatatgttgaaatggccctgaatctgttagtgtccgtgtagaatcctaaaaaggatagatcacactttcatctaaagtgcacatttaagcagagccctattagacatactgacagatgtaattttgccagaaattgctcttttatagtaccagtagcaacatattctctttgtttgggaaggtagtgtcagatgaaaagaaaactcttccctagggaatttatcagcatacaaacgatgttccagacagaatgtaaacgggaaagtcgttgctcaaatcttgtccacactaaaggattcatcagtgtgctttaaaggaaaggggaagctttggagcatagaccatcagagctagaagggatctccaaggtcatctagtccagcccttaatttgtagctgaggaagcaagtttttgggtttttttttgttttgtttttcctgagacagtgtcttgctctttcgcccaggctggagggcagtggcacgatctcagctcactgcaagcttcacctcccaggttcacaccattctcctgcctcagcctcccaagtagctgggactacaggcacctgccaccaccatgcccgactaattttttgtatttttggtagagacggggtttcactgtgttagccaagatagtctcaatctcctgacctcatgatccgcccgcctcagcctcccaaagtgctgggattataggtgtgagccatcgcgcccagctgcaagttattgtttaaggtcaaatggcaagttggtgacagctggatctaaaaagcatttcttccttccacattgcatagtagaaataacttagactttggaattggttggacccgagtttgaataccagcattgccatttataaatgtgaccttgaatgagttacttattctctccgaacactagtttcttgagcaacaaaagaggaatgatattgtaaggcatttatgtagaatggatatactcattcagtcatttctcatgttcagctgatttcttgtaatgaacagaattcacggggtccgtgggtggcaaagagtatttggataaaattaagtcattaagctgggtgtggtggttcatgtctgtaatcccagtactttgggaggatgaggtgggaggatcacttgaggccaggatttctaggcagcctgggcaacatagtgagaccctctttctgcaaaatgttttaaaaaattagctgggcatggtggtatgcatttgtagttttagctactcaggggactgaggggaaaaagaataataattatggcattgtgtgagcatggacttttatttagcttttagaagggaatatcatgttgagcaaaataaagctatacacggaaaagattgtgacaaacttgtgaatgtgagcaaggaaaatgagttaagacatgatttgggattgtttagtctgatgatcacttaagatatagattgagagaggtctgttgtgccattagttttgccattgactattgaaacagaaagcagtgataacatctggttgtttaaataagaagtctgattttttaaagtgaagttcattttccccaattatatcatcaaggcgcactctttgtacaaaatatggcaaatacagatgagtagaagaaaactcaaatacccttccactgcctaaagacaaacattaacattttgctgtattttttcaatatttaatctgaaactttgttaatatggtttcttatcttgttttttttcccactaaacatttctttattattataaactcttggaaattattaaaaaatatattttctgtatgaatataaagtaatagttatttttgaaaatacataaatatcagaaaaagatgaaaaatttataaatctcactagtcagagacattcttgccaacatttctgttacattttctttgcatttgggatattttagtggctactgattggatttaaagtgaaatcctgtcagaagttcatttagcttacatcagtttcaataaaagcccttcaagatgttggaggctggaggtggaggggtggtggggggagggagggaggtgtatgtaggggagaggtggagggagcaagcgagcatgtttgcactcttaggcagtttcacttacgtggctgtccattcgctctggggggcatatgtcctggactaaacttgagatgagagggcctttctcaaccgagaaaacgtgttcctaattccctaaggcatccagtttatgtgatcaattaccttctcccccatgcatttaggatggctccagtgatggatcgttgttgggagaattgagaaaagagttactcggttatttttgtgttcttagttgagatgaggaagactgtttgaaaaagtttgcttaaatgtgttgtttcctaatactgcgcatgacagcatcacactgagtgtgattctggtcatttaagacatgggattttttggtatgacgtagtcaccaggtgcaagtctcctgctgtatctggtcctattctaacaccagatggaaattctgacgggcctttcaagtttaggtttgcttatattccatttagtcttatctgcttgactttagaacctgatctttatataagagattaaaccaatgaaattaaacttcagaaatatttaatgcaatggatagagtaggagaaggggaacaattttaaaaatacagttagcggaatgggtgagatggtgcctagcagcagcagcatctataacaaaaagagctctgttggtttcagtcaactgtaagtcaaaggaataaaggttaagtagaatgttggcagtgactccacttgtgaatgggggtcgagaatgtcaggatagcacagtgaaggggctgtcttggggctcttcatgtgcagagtgtacctgtgtgtgttatttctgctagtggtggtaagttggagaaagctcagaaaagaattcaagaattgtgtttccaggcatcatctagatagagaaggcatgattttaggatctaggaaaagagtaagatcatgcaagaaagctaccttgtatgaggtacagaaaatgataggacattggcctgaagacgaaagttttcattgtttgagggtgtgggaagagctgtcagacaatgggaggcagtgaagcactcgcctttcacagcttctaaaaggaggaaaaagacaaatttgaatgaaaaatatgatttactttgaattgagttcaaaatttgaattcagatgtatatttttaattttttattatttttattttttaaaattttaactttttttagattcagggggtacatgtataggtttgttacatgggtattttgtgtgatgttgaggtttaggatgcgattcaaccagtcaccctggaagtgagcatagtatccaaagttgtccctccctccctctctccctccctccctctctctccaaaagatgtgttttttgttgttgttgtttgtttttttttgtttgtttgtttgtttgttttttttgagacggagtcttacgctgtcacccaggctagagtgcagtggcgcagtctcagctcactgcaacctccacctcccgggttcacgccattctcctgcctcagcctcccgagtagctgggactacaggcacccgccaccacgcccgactaattttttgtatttttggtagagacggggtttcactgtgttagccaagatagtctcgatctcctgacctcgtgatctgctcgcctcagcctcccaaagtgctgggattacaggtgtgagaagatgtgtatttttaagatgtcttgattcataataggataaaagaaacaaatgcctaattttattctccaagaaaggtattacaatgataaagccaagcctataagaaagatccggaaagataagacatcttatggaaggtaaaagacctaattttatggggaaaaagtgtggagttctgttttgtgatttttcagttatatattcataactatgaactgggaagcaaggcacaaatgtcaggtggttaatacagattcttttgtaagacaaacaagttgtttgtgactttacaaaggggaaatgtggacttcctattttaatctaaacactttcaggtagtaacagtatctgtggcctttttctcaacaaaggatatcctccccgtttcccatcacaatttattggatcacaagaatagcggacatacagaagcattaatgtgtgacaatcaggaagtaattttctgagcatcctgtcgcattttcaaagttaatttcagttctgattgggtaaaaatgtatgtaattttcatggagatatttgatacacatatgacatatattgtgttagtgtatcagatgatgtttgtttttgcttaaatagtcttacatctggcatgtccattttcttgaaaataaatgacaacttcctattcagatgctagtttgacttcaatgttgaccaaaggccttgtctcctggttccggcatttcctccatcttggtgcttaccaagtcgatctcgttgccattcttattttggatgagatatagtcggacttaaacctagtatttcagtgtcctggttgtgtagtcacttaggtggcgatgtctttagttaacatggccattatctcttctttttttttggttttgttttgttttttccttaaaaaagaaggtagcttatacaagtaagccagaaatttagactacattcttttaaaaggcccaccttatacagaaaataataagaaagttctaggacttacaccatctctactttgattcagtgttctcaaatcccaacgtaagtttctcttctgatgcccacttaggatgtaagctccacaaggcgggaactttgtatgttgtgctttttgctgtgtccttggttcttagaacagtgtcttatacttcataggctttcattgactccatgcatgctggtttaaagtaatgaatattgacccttttaaaatttgttttatttattattattttttgagacagggtctcactctgtctcccaggctggagtgcagtggtgtgatcatggctcactgcagcctccaaactcctgggctcaagtaatcctcctacctcagccccatgcagctgggactacaggcacataccaccatgcctggctaattaaaaaaaaattttttttttcatagagacagggtttcactctgttgcccaggctgatcttgaactcctgagctaaagggatcctcccatcttggcctcccagagtactgtgatcataggcatgagccaccacacctgacctgacacatttttttaatgtattatgaaaaaaatgtattttgtctctcattggttagaggagaaaaaatttcaaatagacataaaagtagagagaaatgtaacaaacccgtcttctacccatccttttgctcccatgtcatcagcttttcccccaggctttttttttgtgggggtggggtggaggtaaagttggcttatactgtattactagcaccgtaaattgctctagaaagtagttattacagattgttaaatgggaacgaatattagatcttgacatgggcacaaatcctcatttggattatatgtttaccttcttgaggaacagaacattattcttggttggaaaacaagtaatatgtaaatgatagtagtgggacattgaaagaaaggttagatctgcctgtccatgtttcttgcatgtctgtacatggttatgtcattcactcattcagtggtctttattttttagagcagtttttggctcacggcaaaattgagtggaaagtacagagttcttatgtccctcccccacacgctccctcaccatcagcactttacaacagagtggtccatttgctgcagccagtgaacagacattgacacatcaccacctgaagttcatagtttacattagagtccactcttggtggtgtacattctgtgggttttgacaaatgtataatgacatgtatacacggtcataatatcacatagaatagtctccctaccctaaaagtcctctgttccacctgttcatcccttcctccaccccacaaaccccgagcaatcactggtatttttactgtctctagttttgcttttttccaaaatgtcatatagctgaaatcatacagtatgtaggcttttcagattggcttctttcacttaatcctatgcttttgagattcctccatgtctgtttgtggcatgatagctcattttcctttatcgctgaataacattctcttgtctggatgtactgcagcttgtctgtccattcacctattgaaaggcctcttggttgtttccagttttggcagttaggaataaagccgctctaaacattctcgtgtaggttcttatgtgcacataagttttcaccttgtttgtataaatgtcaaggaacccaattgctatgtcatatggtcacaatacgtttagttttgagaaattgccagatggtcctccatagtgcccatacctttttgtatttctttttttttttaaattcataatcagtgtttttattattttcgatgatggctcatttctaagttaagtgatgtatactgtctacatttcccatctataagcttttgtttttcctggacttttgttacctaattttgatttgcttaggttattattttttttaatctatggcatgtcttcctatcgctgtgtacaatggctttcagtagaactttttacatcttcaaactcatcagataactgtgttttaatatctttttctgaggacattcctcccaaatccctctgttctgctccacttggggctgataggtccttttctgttttgagacagggtctcactctgttgcccaggcttcagtgtagtggcacgacgaaaaccagagacctttgttcacttgtttatctgctgaccttccctccactattgtcctgtgaccctgccaaatccccttctgcaagaaacacccaagaatgatcaattaaaaaaaaaaaaaagaaaagaaaaatctacttctggagaaacaaattaccttcccatctcttttgtcaggaaactcttggatgatatactgaccaaaacagggaataacctaacagagaggaagacagggattttaggaaaccagagatcacacaggaaggaggtaaagggaaatcccaggatgatggcaaagggaagtccccaaacaacagctgtgcaacaagaataaagacctttttgtatttctgacatcagtgaatgagagttcctgttgctccacatgctcgtcagcatttggtgttgtcaatgtttttgcgttttagccattctaatcgatttatagcgtatagtatcttattgttgttttaatttgcaaatatcatttatttatgttggtcagtcatgaaaatgacacaccatgatttttgtctttttgggcttaactagatagttgtgttaattagttgttagttttgagtatttggggggctgggtcatttattatacaaacatttgttacacaaacacttagtgagcatctttcctgtgccaggaccaagggtgggatatcaaaaactgcactaggatatcaaaggtgtttgaagagatgggccttgctgcctaggagctgatagtctagtaaaggaacagatagtacaggtgataaggaactttggtatacaggatcttacaagaggtaagaaagtcactttcccataagtaatgtttcattcaaatttcgaaggacgttcaggaattaggcagtgatggtggatagaagggtggcagaatcagggagatcatcctgtacagagggagctgaagtaagacccacgagccccggtccgttcagtctgtttgggaagagcttgggtttttcagcggctcttaaggaatgggagatactgatacttctccagtaagactggagaagtatcaggacttaaagccaaaccttttgtaccatgttaaaatttttgcttttgctttaactagagtggcatgcctttgaagggttttattcaagggactgaaatcagataggtgtgttagattattctgcctgtttaatgggggttgtctttggaagccagggataggacacactgtaattgattagaaaaaataatgagggccccatttaaggcagtaggcatggtgagggaagagttgggtgtgagagacagtaaggagtgtgctcttagagtgcggtgattcgtgggggagtgatggatgatggggagagaggggaactgaatgagcagtggtaccattcacagaggtaaggtggaatagatactaaattcagttttggccatcttgaattgtcttaattctgactcttcatatatatgagttaaactgcttcctgggagggagttttgagcttttgtttttctggttcatctccatggaaaaggtcaaaggttatgagttaggttcttgaattttctggagaaaaaaaaatcatctttattatctacactttgaatatctgttctcagccagcagcactagtactgacttgagtgctcactaatagcctcaatgttgaattaggggctgggtctccgctcctttacagagtacttgaaataattgaggtttcagtttgatagtgtaagggacttgttcaccacttggtatctgcatctgtgcctgtattcttttgggggtgtttattttttcttctctctcttttttttttttttgaaaaacgctctaactaaaaaaaaaaatttaaccttgtaacaatacataaccaagaagataaaagtccttcattaccattattaacaagttactaacaagttggtgcacatgctgtgcagtcaagtcacgtatgacacacacagcgtggcatggggcttgagcagaatcagggtctccttatactattctcaaaggtttttttgatcacaatatcattttggtcagcacgtaaatcaagctctctttttaatagttgcatagtgttttgttgtgtagatatatcatactttatttacatagtttcctgtgtaactgtttaccatctacattttccagttctctaaaccagtgctgtccagttctctaaaccaaagtctgccaccagcgtttctgtgatgacggacacgttctatatctgctgtgtcctgtgtggtagccattagtcacatgtagctgttgagcacttgaaatgtgagtactgcatctaagggactgaatttttaatttcatttaattaattttaacttaaatcgccacaggtggcttagtggctgccttattgggcagcatagctctaaactattccagagtcaagtgagatcattaggctacttccttagaccacatactttggtcttcatcaattatagtttaatgattttctttgatgttgaacttctgtaagcctctcaaagaaatatattttgttgccagactcctttaaaggtctatattttgctgcttgagttttgttccaacagagaatttcttcttccagatctatcagtgtacttccctctagcaagtaaagggtatctgtcgaccttactgtgcatctccttttgtcttggttgcctagaagcccaaagttaatttttatttttattatttttgagacagggtcttattctgttgcccaggctggagtgcagtgtcctgatcacagctcactgcagccttgaattccagggttcaagtgattccccaacctcagtctcccaagtacccaggactacaggaatgtgccaccacacccagataattttcgtatgttttatagagatggagtctcaccatgttgtccaggctggtcttgaattcctgggctcaaacgatcctcctgctttgtcatcccaaagtgctgggattacaggcctgagccaccacatcccaaagttaaatttttgattgaattatagcagttggttttttttgcctctcaccaccacccctatcaaacttcatcactttcttttccttatgagtttaaagatttcgttatgtgtatggttttttttaaataaagctcttcatattctttttgcaggtgcttagattttacatgaagtcttttggatctatcctaaaacttcactaaaaaatgattagcagcggccaggcacagtgacgcacgcctgtaatcccagcactttgggaggccgaggcaggtggatcttttgagctcaggagttcgagaccagcctggccaacatggcaaaaccgtctctattaaaatacagaaaattcgcctggcattattgtgcatacctttggtcccagctactcaggaggctgaggcaggagcatcgcttgagcccaggaggtggaagtggcagtgaagtgagatcatgccactgcactccggcctgggtaatagagcaaaactctatctcaaaaacaacaacaacaacaaaaatcaacagtatatacacactgcttccctcccacagtcatgcacacccacatatacatcttagtgagattctaaatattatcacatgtttgtgggaatcctgtttattacctcagaggaaactatgcatacttaagactctacttaagtactgttgtggttgaccacattttattccactgagttcagattgagttcctttatgtcctttgctgtgtcagtatcatgctttctttccttcagctttatttgggggaacatatgggaaatcttattttgtatgaatttaaaatacgttcttcaggatttcctagttccgtgcatgaccgcctccccaagataatcagtaactgctaaatggtgttaatatattttttcaccttcctagaatagcactgttaaggtatagaaccttgaataaaagtgtacatataatttttttaaagttttgctcttcctttttttctgccgagtttccccccctgggtatttttacatatatcggtacccttagtttttacatagatttcaaaattaagaattagaaagcaataagaatatgcagaaaagttattaataaacacttttgcctgcaaggaagtcgagtagaaccaggaaactactgatgtgctaaggataacacaccaaaccatctgtgttactaactcttggcaggaataaaatgacaaaacaagatcttgggagatgctcattaccaggtgcatgatcaaaaagataaatacattctcatgtaaaaaaattggcgtagtgcctttagcatccttggggcatgtgtgcgtgtgcatgtgggcaagtttagcatttggtgtagttaggaaattgggagaggaaaagggtagaagtagaggactttaacattgcttagagtcattgttattgcaaagtctggaagtgaactctaggaaactgcactggaattcaagtgtaatatgatgataaacatcaaatgactgtttgtagccgaggtgcaaggccaggctcttcaggaaagaatgaataggagaccttaaaataaacatctgtttttttattcagctaacagtggactttgaagaagattggggccatgttcagattttctttttcttccttgagaattgaagaaaaatgtcagctgaggattttttttatgctatttaacatgtcatttgtagtgtttcatgaaaagcagacagatatgtaaagctttttattccacttcaaattagaataataagttagatccagttttgaatttaaaagagaactttaacagatatgttttatgagtgagtttcatgattttgaataaaattttcacacacttaaactacagtggtttggccaggtacggtggccacaactgtactcccattgctttggtaggccaaggtgggaggatcatttgagcccaggagttcaagaccagcctgggcaacatagtgagaccccgtctctacaaaataaaataaattagctaggcatgggtacatgtctgtagtcccagctactcaggaggctgaggcaggaggataacttaagcccaggtgatcaaggctgcagtgagctatgatcatgccactgtactccagcctgggtgacagaacaagactctgtctcataaatacatacatacatacatacctacatacatactacagtggttcatttgaaagtaattctgtatgtcctgttcctaaatgttttaggaatatctggttttcaccaagcttgcatgttctgaatcctgcttaagttcaacgtttataaacctccattaggtatgtgaatttagttttcagcaaattattcctttggtttcccagaagcttccttcacattccagctcctcaagtaaatgttaaaagtttaacaaggaaaaggagtgaattgattttgtatatatttttgtttggtgaaatagcagagtgtaggcatggtcttttcagataagtttgctaaaaagtagtttcctgtcacctccctttgaaaagaactgaggtgtgccccatcctcaaacctaccatctttccaatttatttgtttattggagtagtaggtgggaataaatgtttcttagatttttctggcctcccttcctaagccagggtagctcctggcaaatagtccccagacaaaccttaactgggccgccttcctggaacctcattttatacccaaaatacaaaaaaataaaaatacaaaaataggaaaacacatgaagataaagtgctgcaaacacacgactttgcagatattaatcatacagagccaatcgcttatggtatagaaatagtctgaagtattcttttggcacagcattgcctgtgtgattttcgccagaaaggtttaactggatctgattatgagcagtgatcagcagaggactgtggggaacccctgcaaatcagggctctttctaagagctctggcctgagccttgagcagatgtccacatcctgaaagtcagtgaaggtgggggctcctacattaaaggaaactaaggagacataataacctccttaattcattttttttttttaaaaaacagctttttaaagacataatacacataccatgaagtttatccttttaaagtgtatagtcctaagccaggctctgtggtacccacccataatcccagctattcgggaggctgaggtgagaggatcgcttgagcccaggagtttgtgaccagcctgggtaacatagtgagaccccatctcaaataaaaaagaaaaaaaaaaaacatgaagtgtacagtccagagttgtgcagtggttgccactaattccatgacgttgtgtcacactaaccagaaaccccatgccagtttttcttccttctcctccctctcccagcccctgcaaccactcacctgctttctgtctatgcatttgccttttctggacattcgtgtacagtacgtggtctgttttttcttcagcatgtttcccggcccgtccatgttgtaccatgtctcagtactttattccttttgattgctgagtgacattccattgtgtggatattatcacatttgttcacccattcatcagtggatgaatgtcgttatccagtttttactaagtccagtgtttggacttagtgaagtagctagtctcttaaagatgagttctctggcaactttccccctcccttcatatggaccctgcttttcttgtttctttgtgtgtcctgtaatttttttgttggaagctggatgctttaaataacataatttaggaattatggaactcagtccctcccccaggtccccagggtttgtggttgtttgtttagtgactgtcctggactaattctataaaatctgatttctttctaacgtgtggccactgaagtctctgctcgttgccgaactgtcagctaatgaataaacagagatttccttcaatgcccggaaccagtcggtcgcccagcctctgccagagtgatcctcatgaatgcccctgctcaccattgctctctctattcaagccacactgggctggtctttttactgatccacaaacatgccaagcaattccaacctctaggcctttgtagttgtcaggtagtcttgagggtcactccctcctgccccttgggtccctgtccatcatctccccttcccctctattcttcattgccttctctccttcagtttccacagcaccagtctctgtctgtcatactctccactgcctctcccttgtttgtagtttcccctttctggaaggtaagctccttgagggtggggattgttctgtgttttgtttactgagtatctagagagaagggaaagtgcccgcctctttgttgaataagtgaatggggaggtaactctttgttgaataagtgaatggggaggtaactctttgttgaataagtgaatggggagggagcttaggcaacctgttcttatttaagaatgagggccagacgtggtgtctcactcctgtaatcccagcactttgggaggccgaggccagtggatcactatagctcaggagttcaagaccagcctgggcaacatggcgaaactacatctctacaaaagatacaaaaattagctgggcatggtggcacacacctgtagtcccagctacttgaagggctgaggtgggaggattgcttgaacctgggaggttgaggtggcggtgagctgagatcgcaccactgcactctagtctgggtgataaagtgagaccctgtttcaaaaaaacaaaaaaaatgaagaatgacgtgctaaaatgccagctggggccagacatggtggctcatgcctgtactcccagcactttgggaggccaaggcgggcggatcacctgaggccaggaatttgagaatagcctggccaacatggtgaaaccccgtctctactaaaaatacaaaaattagccaggcgtagtggcacacgcctgtaatcccagctacttggcaggctgaggcacaagaatccaggaggcagaggttgcagtgagccgagatcgcaccactgcactccaacctgggtgacagagcaagactctgcctcaaaaaaaaaaaaaaaaaaaaatgcagggtggtgttgtccactggtagttttcatgtggacccttcagctaatgactctacccagatatcaatatcttaaagtctgtcttctgggacctttcatttactccagagaagaatcccccagttttgttctgaggtgttaggggtttgggctggtagagtggacgcacagcagcataggcttgactttggcattccaggggctgggaaaaggaggcgagggtcccacagtttgatgtctagactgccattaattgtcctgactttagccccacagctcaagtcacctgtgcctggtggcatactccccacccaccccgcacatagggcagctttggttcccctcctccagagaattatcttctggtctctttaggcatggtggggatttgggtgttcatcagctccattgttccccctttattcgggcctgtgcctcatcctgtcgtcccccatgcttagagccttgaagttcttgtcccaaggattctgagagaggaatcttttctctttgctgttcacctctgtaagctctcatgtttacccggttaagtttcttaaactactgcatcttcttcttcagttctttttgtccttaaaggttaataccttttaaaatttatttactgtcattttaaaaaggcttgacagcgatgggggtaccactattaaccaaaagctctctgtgtttcttaacatcagttttaatttggtgtttaaatgtttgcttggggcgtcctgtctccgctagcccttgattgaaggcactctgtcatgcgtatctctactcatagtgtcatatagattgactattgcttgatgggctattagtgagatagtggcttaaggaatcttaacaatttttttttaacttggccttatttttcttgttatttcatttcagtccctaaattatcttttcaaatattaagtcatggcaggtaatagtttttcttttttaaaaataaatcttttaaaatgttgaaattaaattgcttctttgctaatctgatttttaagaacaaaacactacaagtagagtacatttaaatgactcataattactcacacaaatgcatgtaaacttggatatgcaattaggcagctcattatgctgcaaatgcaattacatgcttaaggtcatggccactccctctggctcacccagtgttctcttgggtttatgatcatttattaagcctcagctgtcagaatttgaaaatacatgctgctgctcctagtgaggcctttccaacaataatggaagaaaagctggaaaagaaaattttcttttgagtttatatgcagagttggttttcttaattggcaaaatcccattttcccacaggagatgcaggctaggtaattagaaaaattatcattaatcataatagtggtcagtgatatttatagtatatctatatttagtatatatttaccatatgtagctatgtatagtgtgtatatacattatagtacaactccatcatctcttatctgcaattctgaaatttaaaaagccttgaaagtttgtttataaccctgtggtgaaccctgactggacctgatttattaggacttcaacctatgtgaaataatgaatttctttgtaggtctgtgtttatcccaaatcactggtatgaatttgtgtaggttttgctgcagagatgttaatatggtttgatcatgggccactgacccagaccttactgaagtttttttgttatatacagcatacatactgtattacttttttaaaatgcaaaaagttatttgtttcaaactctggttccagttgtttctgttaaaaaaccagggcctcactgcagtgagctatggtcataccactgcactccagcctgggcaacagcaagatcctgtttcccaaaaagaatcatggcctcacagtaagggtaacagatttctggttagacctggatttaaattctaatagcgggctgggcactctggctcatgtctataatcccagcactttaggaggccgaggtgagcggatcacccgaggtcaggagttcaataccagcctggccaacgtggtgaaacactgtctctactaaaaatacaaaaattagctgggtgtggtagtgcatgcctgtagtcccagctactagggagtctgaggcaggagaatcacttgaacccgggaggcggaggttgcagtgagctgagatcgtggcactgcacttcagcctgggtgacagagtgagactccttctaaaaaaaaaaaaaattctaatgggggataaaaaccctctacctcttagagtgtgggttgctagtgctattattatttttattgttgttattgtttttattattgttccagttccagaactgatatttatatctatttttagagtgtcctgaaaacagttctataataaaataactagatacttgatatggttgttaggtggtaaaaaaaacttttatattcaaactccctgttgctgttagtaaatgtagttcttacctgcttgatttaatagtgtcattataacataaaagtttaaattgaatttctaggattgtaatagtataagatcactaaaaggtaaaaatgacaattcttttaactaaacatcttctgtgtaatcagtgaaatatattaattttatgtagcactacattctaactatttagtgtggcagttaagctttcctggttatgaaaccatagcctctcagttgttcagggccttgctcaagtgccccttgcaaagctatcttgatcggcctcagcagataaagggcttcctagaaccttttaaaaatttcttttttggcactaatcccattgtattgtacttgattgttttccacttacttatgtttgactttagcacttaacttttaccaaatgctcagttaactttttgaatgaatgaatgaagttgaagaaattaagaataatttagtccttccacataagtattgctgtatttgaaacaactctgttccttttgggtttcattctactatttttatagggtatactatacttggaacataataaatatggaatttaataaatatgtgatgaataaaaattgaattaaaatctatttcattacatttcatggtttcagttttattcctgaaattaaaataatttacttaggtcctttttccatgtgattctttttctttctcttcttgtcttctctggtcttctttctcttttttttttttttaacagggtcttattctgttgcccaggctggaatgcagtggcgtgatcatggctcaggtgatcctcccatctcagcctcaggaatagctgggaccacaggcacatgccaccatacctggttaattttttaatatttttaaaaaatatataaaaaatgtgtagagacaaggcctcactacattgcccaggcttgtaaaagaatatttctaggctgggcgctcttgaaattccagcactttgggaggccaagatgggcagatcacctgaggtcaggagttcaagaccagcctggccaacatggtgaaaccccgtctctactaaaaatacaaaaatttagctggttgtggtggtgagtgcctgtaatcccagctactcaggaggctgaggtatgagaatcgcttgaacctgggaggcagaggttgcagtgagcctaaatcacgccactgtactccagcctgggatacagatggagactgtgtctcaaagaaaaaaaataatatttctaaaaaaagataatttcaaatttaatggctgttctatgttatcaattattttcttatttgttccattaatagtacgttagataatgaaaggctttgtcatactcagtagcattataagtaagcagaaaaaaatgatggcatttgtattggtttagtagactttggttctttgtctataatattaatagtactttgttgtggttttaatcacccttgatctgttaaaaccatttatctggtaatcttcagtctttttttctgtctcagcacagctttgggatgtagcacagtgatttttctaaagtagagtgagggaaggagtatcttctttcagctccctaagagtatttattttatttttatttttattgttcttagagacagggtctcactctgttgcccaggctggagggcagtggcaccatcatagctcactgcagcctccaaatcctgggcttaagggatcctcctatctcaccctcctgggataatatttgggactacaggtacatgccatcatgcccagctaattttaacagtctgtttttgtttttgtttttgttttgttttgtttttttaagcagggaagcagggtctaattctgtcacccaggctggagtacagtgacacagtcttggctcactgcaacctccacctcccgggttcaagcgattctcatgcctcagcctcctgagtagctgggatacaggcatgcgccaccacgcctggctaatttttgtatttatagtagagatggggttccactgtgttggccaggctggtctcgaactcctgacctcaggcgatccgcccacctcagcctcccaaagtgctgggattacaggtgtgagccactgtgcctggccaacaatatgtatttttgtagagataggatctcactgtgttgcccaggctgccttgaactcctgggctcaggaagtcctcttgccttggccttccaaagtgctgagattaggcgtgagccattgcacctggcccctaagatttttagtgttcaccctttttcctccccacttgtagtgctttacaggaatacatgataattttgagttttataattaacatcttaaagacaaattgtaatcatagaagcagtgatcatcttgggcacatggcatgtattttcatgtcctttaaaattggttcttccgctcaagtagattggcacaagcagatactttgctgcatttgagttgtagccttcttgtagcatgttggtacataaagattcatattttatagaatcaagtatttccatttagattggttgatatgattatcattaaagttgctaagggagccacattatccctttctagcaatctgatgaatcagttttcaattttctacttttattactactgacctgtgagttgaagaaatatttgctgggcgcagtaccactgcctgtaattctgtctattctggaggctctcaagagtttcaagaccagcctaggcaacacagcaagaacctgtctctaaaaaaataaaaagaaaaaaagaaagtcttataaattgaccacagcatgggcaacatggtgtgactgaagcatagagtacagcaatgtaacagcaggacagaaaacctggaaagtttgaggtagtagtgatagtccatatatggctaaaaaggatgttttcctcaagttgtaaaatgtggaatttagaaagtaaattaatatatttcaaaggattagttgaggtttaacatattttatggctatgaaggcaataaagacattttacacattgacgctgtgatgtagctacatcagagagtgtgacgtgcctgtggttgagccctccttattggctaagctggccactgtttttgaaacttaatggtaggcctctgacgaaaggtctaatgtggataaaacctgcattttataccagtgtaaatcaataatttcaactttgttatggtggttttgatgttttttctctgaaaaggaactcaggaaatgtgattaataaggtcaactgctagatttaattttgtttttgatggaaatattttttcctagaaaatttaatggccatgaatctgattgcagagattatttaccataactagacctgtcccctgacaggcaatttaaaccacttccattaaaatctagataatcagaaagaatgttgtggaacattataaaagagggctatgtgaaagtcaattcacatctagactgttttagtattcctgccttcacctttgaaagtcagtgcacacagtataatctttttgttgtctttgaagcccatgtttatgattgatttaaaaaggtggaacaatttactttgaggttctttgggtaacagtgtacccttgtataggaatcaagatagatctaactttcaccagaagtattcatatacccagtagctttatggtgaggtatttgagtgtttttgtctgaataaggaatattagaccaatttagaaatacttttgccggagaggaccctttcagttttagtacttgatgcatatgaaattcatatgtgttttatacatgaatagatttatttatcacatagttattgagcacctactatttggcaggcactgttctaggtactaaaaattcagcagttaacaaaacagatgtctctcctcagaggacaatatcttggatattatattctaaaaaagcaataatagcatactttgatctcgtctagaaaagaaaagattgctgttttagggagtacaccattatctgatagagctttgcatttgcaggtttatgactcactggaagcagatacccctgtagttacaagggcctcaactctctcggcttcagaagatgcctgtgattttcctagcttgctcatgtgctccttccgacatgaagtcctttctttttttttgagtcagagtctcgctctgtcgcccaggctggagtgcagtggcgtgatcttggctcactgcaagctctgcctccaggattcatgccattctcctgcctcagcctcccgagtaactgggactacaggcatccgccaccgcgcctgatttttttttttttttttttttttgtatttttagtacagacagggtttcaccttgttagccaggatggtctcaatctcctgacctcgtgatcctcccgcctcggcctcccaaagtgctgggattacaggcgtgagccaccgcgcccggccatgaagtcctttcaaatagacttaattcggtgtcccagccttccctagtttttttttaagccatcttccccttggactcagtgcagtctgagttcattgcacacacattgtgtgtgtatgtgcgtgtgtgtggacatgcaagtgcacacatgtgcttcagctggattttaaacttcttcagggagattgtggtcagtgtctttaatttagcacagtgctttgtatgtggtagcatttagttgttgacttcaagctactgtcctaaaattgcttaaaaccatagcagttcttttaaaaagtgttctatatggaattttttaaaaatgccttgcatttcttgaaggtttgtcttttatggttggagtcaaaccacttagtatataaaaacctttacttctatttttaaaaattgtagattgcactaatatgaagtttctgtggaagactatatatgctcgagttattttcatgtttatgagtaccatagctgtgttgaggtgaagagaatcactctttctaatccggcaaaataatgtcactaaattattatggccatatctaacatttacttttctttttatttgaagagggtgttaacaggggctgtttttctttgttataactctcttccttctgcctttccttcttcagaaagtttaagctagatttaataatttccattatgatttctgggtttttttccagtatgcttgattgctactgaaataaacaggttaagtcgtcactggaagttccattttgcccgagtccagtgttctctcattggaatacctctagcttaagggaggatttcgctagcatgtcttctctgttgactgagccaaggtttcctttggcatacattgacctcagcgggtgtggcattttgttgggaaagatttgtatcaatagcaaaaatgtacaaagtgatcatagtattttatgaaagtaggtggattatattttttcatagttggattacaaacttaatgattcatattttattagttggttataattctgttcagccttttgttcctcagcctttcattgggataactcgtggagcctggtcacccatttagttttgaagaattatttatacagaaatttaaaaaatcaactaattatttttaaatggcaagtaaaaattatatgtatttgttgtgtaccgcatgatgttttgaaacatgtatatgttgtggaatggctaaattgagctaattaacatttgcatcacctcacgtagtacttaccattttttgtaatgagatcatttaaaatctactctcttagcgattttcaagaatacaatatattgccattaactatagtctagaattttagtttttaatgagttaaatgaattaaatgaagtggaccatgcagaatggaatgtaattgtcaagtaattagttgaaaaatcttaaaagaaagtaattttgggccgagtgtggtggctgagcctggcagattgcttgaactcaggagttcaagaccaacctgggcaacatggcaaaaccctatctctacaaaataataataataataataataataataataataaaaaatattgttttttaaaaaggtaatttttcttttagacttttgtttggcaaacttaaaaaatctagtgtaccaaataatgcttttgtagaattctagtagtattttgaaggaaggaggtgatacatgaatggatggatgttattataagtatctgaattatttatctgtactttgatagtgctaatataagaacattcattcatacttttgtaccttagactaagtgaggttgttttctcttacaagcctaaacatttaccactttgtttattctcttctgttatatacttgttcattatacatactgcatccatttgtcaatacttctgatagaaaaaaggatttagaaatcatgtttaacaaaatctggttataaataactgagacttggatggcgtggtaaactgtgcctttgctgaccttctcataaacaccaacaggttttgggtcctgctcctcggtggtgttccttcttagacaacttgaccgaagaattagaagagaatccagaaagcacagtctatgatgattataaatttgtcaccaagaaagaccttgaaaatttaggtaaaaaaaaaattgtgatgaaatattatgtaattacttcatttctactttttttttgagttttcaacatgagaattggctgagccatgtttacctcatctcccaaatcttccctttctgccaaatcagatattaaacatattataaattgtcagatttgtaacctttctccttagagaaaagttcaagtaaatttaacatgctgaagcttttttgtattttaaatgagaatttattttagcaaataatttcttttagcatactagctattatagaggaaaaaaattgtcacgaaagcagtgatttttttttcaccagtattatctgaagtataataaggttttgaaaatgtctcagagacggcaagtaaatgattcctgcctcccttttaggtttgattataaaagacccaatccaaaacttagaagtgatacattgaaacttcagatgtagaagaaccttaatagttactttatgtttgaaggtcacaagccaagaagtgtcttaaaagaacagcaaatacttatgagatagggcttactatgtgcagatagtatttttttttttttttttttttgagacagagtcttgctgtgtcacccaggctgcagtgcagtggcccaatcttgtctgattgcaacctccgcttcctaggctaaagtcattctcctacctcaacctcccgagtagctgggattacagatgtgcactgccatgcagcatggtaagacggggtttcaccatgttggccgggctggtcttgaactcctggcctcaggtgatccacccacctcagcctctcaaagtactgggattacaggtgcgagccaccacgcccagtctgtgcaggcagtattctaagcgttctacatgtaactcatttaatcttcacatccctatggattgggtactattatgattccattagataaggaaactgaggcaaaaaaaaaagataaatgtacgttgccagaagtttcagttgtagtaaacttgagagttgagctttaaatccaagagtccgtgccctttccccagccatcccagcccctgcaggacatgttgcgcctgcttgcctagccctcctctaggttagagtagatggtgctcatcttgttctgctgctgtcagagggctacagcagaagttactgagagtgggaaaacttagaggatccattctatacaaggcaaggcaacttagttgtctttggaacaaatagatgtgcaacaacagttgagtattaaaacagaatcatgttaccattagattaattaaacttcctttttaacccatatctcatagcacagttaatccaggcggaattactttctgtcagttactaccaaaaaagagctgaatttagccttttaaaaaatgacttgaatgaaataggaccttcttactgcagtgccttcttaagtgtctccaacgtagttttcataatatgctgtcacactcacctacattcttaaatcgaatgaaaaaaggtcattgttcttttatggattttttaaaaactactatgtttagtacattttgggttctttttcagtttctttactgggtttattttgggtgaaaaaagcagttatataagtttaggtatattttgttaaaaagtaattgtactgctcatttttaaaactatagaaatagatattcaacaaaatgacagtcatactagaaagcattttatgtatattactaatatcttttgatgtcaaatgagcttttatcatttccccataatatataaaaccttctaaatagaatatcttaagagtagaagtaagtaatgaacttcccttacttcctaagattatttttagcgcagcattagtatattgaagatttgcaagttctgactcttctggatatggccaacagcagatcttatagcttggtatttcccacagtgcgttctttggaaaattacgtctgtaaaaaggactgggtggatagcatagtggctgatattgtgggcactacaggtagactgatatgggtttacatcccacctttctcacttaatatctgcacaacttggccaattcacttcgcctctttaagccttggtttcctcatatgtaaaatgggaataatattggtcccaacccatggggttgcctggagaatgaatcagaaaatgcttggaaaatattcagcaccctgttattttaggagatttgtggcaaataagtttgggaaatgctaggttaagcacagttaaatcaatttctttacctcgcatacttcttagagcctttaataccatcatacattgtaaatctccaaacggaaggaaagtatgaaacatttcccaaacttacttgaccatggagcccttttttctcagaagatctcttgggactaatgatccatggagttaactgtaggaaatgctgctgcatccggttctcgggttaggattgtttcgctatgaaaagcgcttcacttggtttttatttatgacctgacttggattaattctgtgacattaataaaggaaacaaaaaattacttttgcaatcactggtatatgtattttataatgtagtggttaatcagacccttatcctgaggaagatttagagaatatacacgtgcagttgtatacattcacgtttcattaaggctcagccctcttttgttaggactccattgtgaaagtgcaaaccccatagttttattaacctaatgaattctatgacagtattttcctaatcaagttttagaattccgttatgagaatatcctaaatttaattttcttttttatattgttctataacatatactattttatactactgtatgattttgctcagtacttgattttcaggtctagatggatgtatatttctaaaatttggaaattagagtaatgctttccttagaaagacagtcacttataccaggggtccccaacccctgggccatggacccataccagttggtgggtggcctatgaggaaccaggccacacagcaggaggcgagtggtaagtgaccatgactgcctgagctccgcctcctggcagccgtggcatttgattctcataggagcgtgaaactagtgtgaactgcacatgcgagggatctaggttgtgggctccttgtgagaatctaatgcctgatgatctgagatggaatagtttcgtcctgaaaccgtccctccctgcatccgtggaaaaattgtcttctacaaaaccagtccctggtgccaaaaaggttggggaccactgacatatatcataaatgttctgcatgtgagtacatcacatgtggacttattttgaagatctcaatctttttctgtgtcaatatttggaattaataaataattcctgtgacatagagcattcttatgtgaccaccagcaccacaaattctaagtgtaacctattaaaactgggaaactctgtgaaagtattgtttgaggcagggttctcaaatgctgactggcagtggacttttcattagtccctgatgaggagtgcatatgtgatatgagtattaatatgcatgtatgtatgtttatatatggtggtaggaatttgtcagctgttctttcttggaagacggttctttctacgttgtgtttgtgagtgtcctttgtctttgcaaatggtcgatgacaatgtttctcctgtctcccttctcctcatttcaatttggcaacttactgttgatccccagtattattttctaaattgaacttgtttgtggaaataaaaaatctgaggaccactcagagggcataagggaaccctctttgtcttagttcataaggactttctcatcatttttgtgtgtagtattattacatttaaaataaggatgatattgctgaagtagattaaatgttctctatagatatcaaagaagattagtaattctaatccttaaatttttagtctgaagtgaaatcttactataatcaaattgttgcccaagaaaaactgttgaatgttaatgaagattgcataaggacctgctgtcttctgtttgacctttcccagggctcacccacctcattggatctcctttcctccgggcatatatgcatgggtttttcatggatataagactctatcacaaggtaaacagaaaattacagttattatgtttcaggtaactaatgcgcagtctatggccatttcctcactactcgcactttcataaatcatacataggatttgtaggggatctgcctgttctttggcataactgtcgtggtgtatatgaaaatgatattaccaaataccattcttttattttaaaaacttttttcattttgaaaaggtgaaactgatggtaaatccatttgcttatgaagaatataggaaagataaaatacgacagaaaatagaagaaacacgtgcacagagagtccagttaaaggtaaatattatacttaccattgaatttatcagagaagagtacttaatttccattttgtgtattattccaaagaaatctgccattcttttcttgattttccatctttaatttgcatcttttactgatatttttggtatagtttgtttgtcatcagtgtgtcatgtttgtcatgagggtgcaaaactctttacaattttcgcattatgacctctgcggtaattgtactgtgggacataatgctagaatgattgatattgtcacctccactagaaacctgatagcatttttaaatgggttttccatttttggagtatccgggctttgctaatccctattccttactgacctttggccgtatcttaggctctgtttggatcatgggaaatggtcgacagtcgtaaactgcactcgctgtctgagtacatagaatttaatgtaaagaatgattaacttggtattggagaactgaaaagacagaactgctaaaggatggaggagagaggtaaactgcaggaagcagccaccaactcagagctgcggaacagcctggggaataggaagaggaggccccgtggagctggacccaggcctctgaggaggggccacaggccggttccagggcccttgaggcataatagcaaggatgttcctgggagcgttggaaactgcaaactggaatccaccactgctgtggaaccagctgttgtttccaggacaaagagttgctgttgtgtgatgccagtgtagacagagaagggcaggccctgctcctgcacctgccttgcagtctgtctgcagccgcccctgttggttcatttcaaccaccaaatgataccaatgtgtataactgaatgttggtatacgtacatactctgtcactataaaagactagtgactgttttctgcatttaccctcagtacttttttgtttttccagactgttaaaagatttctggtgtatttttgagacaggatcttgctttgttgcccatggtggagtacagtggcatgatcagagctcactgcagcctcgacctgagctcaagtgatcttcccacctcagcctcccaagtagctagggactataggcgcacactaccacactcaactaattttttgtagttttagtagagacagaattttgccgtgttgcccaggctggtctttaacttcagggctaaagtgagcctcccatcggcttcccaaagtgctgggattacagtcatgagccattgcgctgcctctcagtgcactggaaagaggctctcagtgccctgggaagagaaatgagggcgagttccctagcagtaagctggggttgccgtttttttgccatgtggcccacctggtatcatcacctgtctacatttcctactatgaggataatgaaatttttaaaatacgaattagttggctgggcgtggtggctcatgcctgtaatcccagcactttgggaaggcccaggcaggcggatcacgaggtcaggagatcgagactgtcctggctgacacagtgaaaccccgtctctactaaaaatacaaaaaattagccggatgttgtggcgggtgcctgtggtcccagctactcgggaggctgagacaggagaatggcatgaacccgggaggcggaggttgcagtgagctgagattgcgcccctgcactccatcctgggtgacagagcgagactccatctcaaaaaaaaaataataaaataagaattagttatctcctatttatgaaattatacttacacaactgttcacctttaagctaatatgtaaatatgttagcttttaaaataaaataaaataccagcttttattttctctctagaaattgccaaaagttaacaaagagctggcacttaaattaattgaggaagaagaggagaagcagaaatctacatggaaaaagaaagttaaggtaaggtgaaaaagtatcggcaaattgtttctgcgttttgttgatagtaacttacatcttttttattgtttctttttactttaaaaatacatgtaggactttttctttcctgcgtataagattagtatatgcttaagatgggaagtctggaaaatagaaaagaatatcaagaagaaagctatccttacgattcttataccagagaaaggcatcattaatatttcagtgaattttcttcctgtcttgtttcaaaattagaaactacaatagcaagagtcttgtatgtgtaaaatgtttatcctgattctttaaaataacacaggtggtttcccattttgttaaaaattctttgtaaatatttttaatggctacatattctgttttatgaagtgattataatttactcaatccttctattgttaaacgtttagattattgtttttctttgttcataactccagaagtaactgatttttatttagacttggtgttcttacgagtatgcaggctgaagtgtaacttccacctgctttcctttattaatgtgaaaatagacaaagatcagtcataagataaataaaagttagcactttgtttagttggtattgtccagaggtgagatttttctagtgttttcagatgtatgaaggtacctgggtccttgccaatcttgttttctctgcttagatgaggcaggcagatagccaagcttggttatgtgctggaatgagttggaaagaactgatctctgcgacagcctgcagaacctaatgagtaaggagctgaccttgtagttttgggccagctgtgtggtgccctcaggaggttctttttttttttaagcttattctttctctgtcctctggtttttaaccaggtacatgcatctaagatgggtgagctccttttgtcttcatttctgttcatgctcttcaatacccagggactgcaactgaagggtcttgttcctagctcctggcacactgcttatgtaatcttgggcgattgctcatcttcatggggtcacagctttttcatctgtaacatgcaaggaccggatatgggcattcttagagctgtgctttccaaatggattcagactcaagactcccccttgctgtctcctgcttccttagtctttccctgcatcccctcatcctcgtttattacattcctttagtatattgtttaaattttaatttctggaagcctctcaagtaaatagaggacttttaggtttccattttcatgacatgaatagtatgccaatgttgaaataattcctcaaacttattaatatttgaatttatgtctgtgtgtaatagctctgcaccttcctaagttacaccaatgtgtataaatgaatatatatatctttaagtatttagaatacaagtctttgctgctgtgttgactctctcctcagagtattcacactgatcttcttgttagctaagcctaagcatgattagggaggtaacttttctgctttgtaatgtcattttacagtaaaagctaaatggaagtgatctttggatgtacatgccatgccctaaggcttcagtagatagagagtagagctaacttagactgtagatgtttgcattcctatctgtgttttatgccagagtctttatcatctgatagaggcaagaatacttaagttacaatttaattttgctactttgtgcagcatgctataccagagcctgtttataaggccctgtgattatctagatgcagaagtgcccttcccttcccccccatttctttgtagacctttgctgaggttgagggcagccagagaagatttagaataccccatagtgcaggatggtggaaatgacttcacaagttgaacacatgcagagcaatcctcatggtcaggagggaaaattagcattgttccatgcctttaaacatttttgacaaaacattaaaaactctcttactgtccattataaattggaaaactaggatcttttcattatattgtaatttaagacattaggaataaagcctaattgagtattttattttctttgttttcttttatttcttttgtcaatagtacttggaacagtgcttacttttttctcctcctaaacttttgatacggagccagcatttttctttgcctcagcaaattgtcatactcactttctaagtttggataagcttccgatgtttcatcctttgctcttttgacgttatgaattgtctctgagagttcctttcatgtaaagttttttgccagtgtcacttccactgggacacttttcttcttcttgtcacaactgttttcctcatttgttttcagaggttcaccattacgtggtcccctcactacagacttagagtgccagccagtgacagtagccacattccctgtattcccacagccagctctttcttctgtaactccctttaaatttgattcacatttttgttgttgcagttttatcttgttgattagttctctgtaaattattcttttttgtaaatgtcacacgagtttgtcttcggtatctaaagaagcaatgcaacagttatacacgcgtcctgtctgcaggaactgaacaggaaattcacggtgcatcacaccgcctgatgcagtgtccggtcactgacaggctttgagaaaagcaacccattatttacgtagggatttgtggactaaagagctcgctgtggagttatactttatgaacatactcagttgatgaacagagataactgaaatttgaaccgtcttgttggggcacctggtattctttaactgcattccttagctactccttccttttggcaccgtgcgaatcaagaacttgcctttctgttatctccagtcacatctacgttccgttgatgttcactcattttgttgctacatattctctaattaactatcaggatggcatttgattattttaaaacctattggtgggtcaccctgtaaagatttaccaagctgtgtaccattttacttccagtgaaaaggaggaagaaccttagaaattcctatcttcttccatcaaacagcagtttctcttcagctcttcatagctggaaatgtgatctttgtagccatatcacgtgataacagaattcttccaaagagtactatttgtaaaatgtgcccctaatcttcttgttggtgacttcctagcccaaatcagacctattatcagagctcagtttcattccagaaatatttatatatggtcttttgaaaatctgaggctgtgcttggaaaaagtttgtataatttgttgttgaacagtttcatcttatgtaaagtgaagatcgtagaaatcactcatgaattaaggaaagaatccttcattataatttaaaagactacttgaaagaattgctaagtctcatcagcagatcattagtctcgcctttgaactcagctcctcaaaagcttgagaactttactagctgtgatacctcctgatttgaaagtaggtatcttgcaataccaatttgaaaggtatgttttgccttgtctgcagctgaaatttattggagacagtgaaatgtgttcccaaatattgctgccactgagaacacaaaaatcgaataagatgtttactgtatggttgatattgaacctaaaatgggaagtggcccaccacataatgtcaatcagtattatatggacattatccaaactcagaaattttggttgcattaattctagttaacaattaaggccgagtgcagtggctcacgcctgtattcccaatactttgggtggctgaggcaggaagattacttgagcccaggagttggagtctgcagtgagccatgatcacaccactgtactgcagcctgggctacagggcaagacagcatctctttaaaaaaaaaaatgaatgaatgtatttattctttcaacaaatatgtattgaatttccagtatgcacaaacagctttgagaggcatgggcatctgtgatctgtttgatttgtgagggtttgagttttggttagagctatttttcctataggtatcattttttgtatgttagtcttttttgtcagtttcttgctgtggccttaaagtctctgatgaatgtacttttctttcattctgcagcagctcaggcaggactgtgcatgagatctctaggccaggggtctccaacccccaggccatggtactggtctggggccttttaggaatcaggccgcacaccaggaggtgaacctcaagcttcatctgtatttacagccactccccattgctcacattactgcctgagccccacctcctgtcaggtcagtggccacattagattctcataggagcatgaaccctattgtgaactgcgcatgcgagggatctaggttgcgagctccttatgagaatctaatgcctgatgatctgtcactgtctctcattagcccccgatgggacattctagttgcaggaaaacaagctcaaggctcccgctgattttatattatggcgagttgtataattatttcattattattacagtgtaataataatagaaataaagtgcacaataaatgtaatgcgcttgaatcatcccaaaactccctcgcgcccgccccccgccccccaccaccatctgtggaaaacttgtcttccgaaactagtccctggtgccaaaaaggttgaggatcactgttctaggctatgtgtattctgtggttaggaacccatggaagagatattttagcagtttcaggaattactaaataccactgagaacttatattaaagtaatacctcatctctctagggaatacaattaggtacagatactttgggttggatcaggtcagttttaacatccaaaatattatttttaaagcttttttagtatcaattaaaatttttgttttttttaaattacagttatacatgcatagttttaaaaactaaacatttcagtctgggcacagtgcctaacacaaacattatgggctcacacctgtaatcccagcacttcgggaggccaaggcaggcagatcacttgaggccaggagtttgagaccactctggccaacacagtgaaaccccatttctactaaaaatagaaaaactagttgggtgtggtggtgcgtacctgtaatcccagctacttgggaggctgaggcaggagaattgcttgaacctgggaggcagaggttgcagtgagccaagatcacgccattgcactctagcctgggcaacagagcaagactccatctcaaaaaacaaacaaacaaacaaaaacaaaacaaaacaaaaaaacatttctgtaatcccatcattttgggaggccaaggcagggaggatcacttgagcccaggagttcaagaccagcctgggcaacatggtgaaaccgcatctctacaaaacattagctgggtgtagtggtgcatgcctgtggtcccagctactcaggaggctgaggtgggaggatctccctgcaaggccgcagttagccatggttgtgccactgcactccagcccagtaacagagtgagactctgtcaaaaacaaaaacaaaaaaaacctaaacatttctccaaggtttgttaggaatgtaggccatcccattgtctgccccttttcctccctctgccttcctccattttcacctcttctcagacaaccacttttgccttttttgctgattattttggtataaatctctctctctctctctctctctctctctctctctgccccctccccctccctccctcttgcctgtagtcctacctcttaactttttagtgttaggcattatcttttgataactttcctttccaaggaagctatattgtgattttgattaagttggtattcagcattacattgttgtacttttgttttttgagatagagcctgttacccaggctggagtacagtggcagaatcatagcttactgcagcctcagtctctcgggcttaagtgatcctctcacctcagcctctcaagtagctgggattacaggtgcacaccacacccagctaatatatatgtatgtatatattttagtagagctgaggtctcactgtgttgtccgggctggtctccaactcctgagctcaagagatcctcccacctcagcctcccaaagtgttgggattacaggcacgagccaccatgcctggcctacgtaagtgctatttccagccgagtcagtagtaatctgtgactgcatttcttgttcaatctttgtgtcctttgaagttaataattgtctctcttgctcgttttctatgtagttatcactaatcaacacccaattctatgtcagttctctaagtcttattttgaggtgtttagataggttagacttatgcttatttaccttcctgaagaagttgcttctagaattttctgccccattccattctagcctggtcaccttctaatcccgggacctccctttaccattatcctggggattcacttcacctcagcccatgttggacagagaattacaagaaccttcagtttcctgaaggaatatagtttccaacctaggcaagcagtcagtcaatgtgagggtatggtagatattttcagacatgcaagttctcaacaacaaccaattccccttaaatgctgcttttcctcgggaagttgctaggggagttgtttctctaaaataacagtgtaagcccaggaagaggaagcgtcctgggaaacctgacacgaagcgactgtactgtgctgcaagcccatctcagtctagaagttcggtcttcagtgctggggaattttcttgaaagaaaatttcaattagtttttcctgccatgatccatagttattttttggcagtgaggaataagagagttaaaaaactgaatgaaaactctaggtggggacagggtccctcagtcagtgtgcagtgacttggccacactgtttggggaaggacactgcacatgtcattgtctcttaggtctttctcttggctggtcaggtcctcctgcttgggggggtaaaggcctggctaccagcattcctagaactgaccactgtaggtcacaagaggttggaggggtccagagagcacctcacccccatgtgccagccttgccctcccctccttgtggccagcacacctctcttgctcttgcagtgccagcctcagccaagcaacttctccgtgggaaagggctggggccaggctttccagagctggggtgtgatttttaaataggctttctttctggcttccaaatttttattacccctatttcctttcctttttttcttaagggtttatgccctttttataaagctccttttctgttgttctagtgaagttttaggagagattagaagatactagtgttcaagccaccatctttactcagaagtctgtaccagcctaacttcataggtatcatagcattgaaagaactaatttgattggccggggtgcagtggctcacgcctgtaatcccagcactttgggaggccgaggcaggcgaatcaccaggtcagaagtttgagaccagcctgaccaagtggtgaaaccccgtctctactaaaaacacaaaaattagccggccgtggtggcgcgtgcctgtaatcccagctactccaggaggctgaggcaggagaatcgcttgaacccgggaggcagaggttgcagtgagccgagatcacaccactgcactccagcctgcgtgacagagcaagaccccatctcaaaagaaaaaaaagaaaaaaaaaaaaactaatttgtttcaaatggcaatcattcttcatatatgttactatgttggaacaaaataataataggcgtcccactcaggtagacagataccattcttccaggtaggactgtggtatgaatagtactttaatgttttctatattttaatggtaaagttgagcatgtgtagacgggtatttataggacggatcactagccagacacttgtaagctcctatagaacattaatagctataccttatcctacttttttccttaagacagctgtgaaaacaaacagactaggaaaaaaccctgagggaaatatttttacaagctgggtcagaagaggttttattttatagttgttcatccaaagcatacttgtctttaggcaatgcaattgatttgttttaaattaagaaaaaaatcttaataccagcaacatatgtagtctttgtaacattttctctatttattaaatatgattattactttaataaatatagtaagatgaaaagtaaatatttgcccttgggtttttttaacctgaaaatgtgtaataggcacatagttattcatttgaaattatctttcacactatcatctatccgatatctacagataactccaaaatttacatcatagccccctcccttctcctgagacatggcgcatcgttcccagacacctagtggtgtccgtctgaatcctggtgctcttctccctgtgccacaggcataggcagccctaaatggagcgtgatttcttcccctttactccacccctgcgttttttcctaatgctctccagtgatggattctaactcagtgtcgccagctttctggttgcttaagctacatgtttgagagaagtttctaaccctgtttttaattcttaaccctcccatctccatagctggatctgtcaattctaatttagaactgtatctcgtaattattctttcttaaaaactgtctgttcccattgccctaattcaggccctgtctctcttgccagtttcttaaaatggcttcttagtcttctcatgatgctaacttcttactcagcagtccgtcagacatcatgctgctgcagacttttgaagcacaattttgggttggtttgtttgtttgtttgtttgtttgtgacaaggtctctctgttacgcaggctggagtacatggtgtgatctcaactcactgcagccctgacttcccaggctcaagcgatcctcctacctcagccttccaagtagctgggactacaggcatgcaccaccacgcctgactaattttttatattttgtatagacagcgtctcaccatgttgcccaggctggtcttgaacttctggcctcaagcagtcctcccacctcagcctcccaaagtgctgagattgcaggcatgaaccaccacctggccagttctgtcatctgggagtcttgaagcacacttctgttgatcatccatcttctccttcctccctccttccctgtctccctccttcgtttctcttcctttttctcttcctcttcttcctccccctcctcctcttcgctagtggtttccccttatatcttcaaaataacagtcatggtatttaaaatcctttacagtatgacccaatcaaaaaattgttttgaaattgcatcattcttatgtcgccagactattcaccactcccatcggctggaaatgctgtttcttcagatttctacttgttgaaacctactcatctttcaagccccctccctgatgctgcaccccccagggcccctcctggggtgtcttttgttgagattcctttttctgtcctctcctgtggcactttcagcactaccgagcagccctcagaagaggcctagtagcacgtgtttgcagtgttttttcttccttactagtttaggatcaggaactcgatcttacctttctttttcccttcgtcgtaagtctttcttggaaatgatgtttaatcagggaaacttgctgcatttaatatcttagaattttaggtaagggtttatctgtttttaggtacatacaaataataaacaggccaagttccttaatatcttatgatttactaaacttttgtataggtctgtcacacaaataatattcagaactcaactgcctgcaatcttgtttactctcaacagtggagaaatagtaaagtagtctgttcagcagagtcagagtccatcacaaacaggtcagctttttccagcagtgttcagggctgtttactctgattgacaaacaattctgagtaagccgtttcatctggcttccaagcctgtagcagagaaggaacaataagacagtcctaaatgtgtaagattctctgtcatctacttaagtgaacaggtaagtttacagtacagtttagaaaactttccattgaaaatggtacaaataaaaaggaatttagtgtcagtcctgagctatctaaatgggtctcagtagccaaagtttttgtatctgaaggatacacaatatcctttgacaacaattagttgacctgagggggaatattgatgaaacaaccctgtaggggatggatcagctggaatcggtaaactgacatcaccagcttcctgcatcccaccatgtgagttactgactttgtatacctcctctcccagttttggaatctgaagttgaaagaattgcttattttaagtcagtgtagtaactaagctttatttaaaagccctgttttcagtggctcatgcctgtaatcccagtactatgggaggccaaggcacgagaaattgcttgagcccaagaattcaagaccatcctgggcaacatagtgagacccatctctacaaaaaataaaaaattagccgggtgcggtggtgcacctgtggtcccagctacttgggagcctgactgaggtgggaggatcacttgagcccaggaggttggggctgcagtgagctgtgattgtgccactgcactccagcctggagtgagaccgtatctctaaaaaataataaaagccactttttaaaaacctagtatcttcttgaaaggtgttttttttgcattaaaatgttaattgaagaaattctttctaatctgttaagcataaagttagccaaaagggtcattcttggctcattgtgtgtaatggccaagtggtgtagagcatctgcaaagtagattaatagaggttgttttggtggtggcagctaaaacctaggggcacgttgaaagtcctggaagaaatttcataatgagttaataatgtatgcctcatgccgcttattaacttataatagaatcagtgttttaaaaccatgtttctggtcaaattttagtcagatattaacttaaatttttacatactttttcctccttgtagagtcttcctaatattctcaccgatgatcgatttaaagttatgtttgagaaccctgacttccaagtagatgaagagagtgaagaatttaggcttctgaatccacttgtttcaaaaattagtgaaaaaaggaagaagaaactaagactcttagagcaacaagaacttcgtgaaaaagtaatgtactccttatcagttagaatttgctactgtttctttaatgtaatgttttctttgtaagttagaagagtctttgattatacttgagatgtaattaattccatattaagtgtttgacattgggcttaggagtattatcttatttaattaaaggcatttctcctgatgcatgcagtagagcagctgttaggcactcattaatgggccagtgctgcttcagagaaaccaaggggtctgtgtttgactgggggaaaggagttgctgcttactatttttattctcaggaagaggaggaagagccggaaggaaaaccaagtgatgcagaaagttcggagagttcagatgatgaaaaagcctgggttgaagaggtcaggaagcaacgcagactcctccagcaggaggaaaaagtgaagcggcaggaacgactcaaggaggaccagcagacagtcctaaagccccagttttatgagatcaaagcaggagaagaatttagaagcttcaaagattctgccacaaagcagaaactgatgaagtgagtagcactgcctgagcgcacagttgacatgtaaccaagcccttgcttttcctctctggcacattgccctaaagatgacatttctgtctttggatgatggaggtgcagagggtggaggggacgagggaagcaggggaggtaaggccgtgcaggaggtgatgtgagggaagcacccaggaggcctgaggggagcgtcgctattgaagtacattggtctctaggggatttacttatttgtcacaactttttgaggtatagtttacatgcagtaaaatacagggtagagagagccttatgagtatcagtggaacacttttaagctgcagaagccacacactttccttgtccttgttttttccccatggggttccctcacctacaaatacttactctgtgccctacagatcagtggtttgaagccttttggacagtggttgctaggagatgacaacttttctgcttcttcacaaagttattttaaaaaattagaacctcggttatgtttaccccatctcactttacctggttattgaaaaggttacttggaaaatttgccagaaattttaagtctttttcaggaaaattgagagatcgaaaagagtagtattctagaataggcaaatatgtagaaagaggcagaaagtagaatggtggttgccgagtgtttcatgggtacagagtttcaggttggattatgaaaatgttctggaaatagttggtagtggtggttgtacaacagtgtgaatgtacttaatgctgctgaactgtctacttaaaaatggttaaaatggtaagttttatgttataaatatttaccacccttccaaaaaaattgaccttccccaaaaaaggtagttttatttgaataattttcagttgtcaggagtctgagtcaggaacaagctaggtgtcaagcccaagttgtatgtaaactctaaattatgcaagtctctgctttgagaattcctaggcaaagtattgatgcacaagattggaatatgatagacggtcacaggagatgtcttaaaagaatagtggaatgtctggggagccaagggagcagtcttgaggtggagcaagaggagtgggcagaatagacaaggtgttaggctggggtcagtacatttctgtaccttgtacttctccagctcccagctctccgtgcaggagaaggtgttttctccgaagtgggaggaggaaaagggtggggaggacatcagtgaacaggtggaattgtttctggggttgagatatgttttattcatctttatttcaccagcttctagcaaatatctgcaacaccagatgtagtgaatccttgaatttagaattcagaagcacctcaaaattctggttctgatgaactaactaaagatatgtccatgaataaagaagctagtagagttgacccttgaacaactcgagggctaggagtgccaaccccctgcaaagtaaaaaatgtgcatttaggccgggcacggtggctcacgcctgtaatcctagcactttgggaggccaaggggggggcagatcatgaggtcaggagatggagaccatcctggccaacatggtgaaaccccgtctctactaaaaatataaaacttagctgggtgtggcggcacgtgcctgtagtcccagctactcaggaggctgaggcaggagaattgcttggacccgggaggcagaggttgcagtgagctgagatcacgccactgcactccagtctggcaacagaactagactccatctcaaaaaaaaaaaaaatatatatatatatatgtgtatatatatatatgtatgtatatatatatgtatatatatgtatatatatatgtgtatatatatgtgtatatatatgtgtatatatatgtgtatatatgtgtatatatgtatatatatgtgtatatatgtatatatatgtatatatatgtatatatatgtgtatatatatgtatatatatgtatatatatatgtatatatatatgtatatatatatacatttaactttttgtgttatttattttcactagaaagtctagacctaacacatacaacttttgatttcctgaaaacttcattttttttttaaaccttcttggtgactgagaacctagaatatccccaaaaactttactactaatagcctactggtaaccagaatttttaacagtcaggggtcaattaccacatattttgtatgttctatgtattatatactgtactcatacaataagataagctggagaaaagcaaatgttattaagaaaatcataaggaaaggaaaatatatttattcattaggtaggagaggatcattgtaaaggtcttcatccttgttgtcttcatgttgagtggtctgaagaggaagaagaggagggattggtcttcctgtctcggaaggcagagtcagaagaggaggaagtggaagggaggcaggggaggcgagtaatggtgttaacttttattggaaaaactgcgtgtaagtggagcagtgcagttcaaacccatgtcattcaagggccaactataatgttcttggtatcttttgaaggtgttttctttactgaccaacctcactttttaaaataaccactttcttgagatataatttatgtaacatacaattcatctgcttaaagcatgcagttcactggttgttagtaatgtaacatacaattcatctgcttaaagcatgcagttcactggttgttagtaatgtagcatacaattcatctgcttaaagcatgcagttcactggttgttagtaatgtaacatacaattcatctgcttaaagcatgcagttcactggtgtttagtatattcacagagttctggaactatcaccttaattttagaacattgtcatcaccccaaaaagaaaccccacgccttatgggcagtcaccccacatttaccctaccccatctcccatcctgaggcagccactagtttacttttctgtctctatcgatttgcctattctgacatctcatgtaaagggaactgtataatgtgtggccctttgtggctggcctctttcccttagcacagtgtctttaatgttcatccgtgttgtagcatctatcggtgtagtcagccctctgtatccaagggttcctcatccataaattcaaccaatatgggctgaaaatattcagaaaaaatttgtaactgtactgaacgtgtacagacttttttcttgactttattccctaaacaatagtataacaactatgcatgtagcatttacattgtattaggtattataagtaatctacagataatttaacatataggagagggtgtgcacaggttatatggaaataaccacaccattttatacaacttgagcatccatggattttagtatccaagggaggtcctggaaccaattccccagcggataccaagggacaactccactccatttgtttttattaccaagtaatattccagtgtatgtatagaccagtttatatcccttcgtcagttaatggacatctgggtagtttccactttttggctattatgaataatgctgctatgaacattggtttatacagttttacatgtgttttgcatatgttttcatctatgtgcaagaattggaagaaattgctggtcatatagtaactctatgtttagccttttcagaaaccggcaaacttgtccacaggctgtgccattttacattctccagcagcgtgtgcagcctcactttttatacagctgttatgtgtaggtgttttactgggagtcctgcttggtttgtgctgttctggttctgtggagtaagtttatttgttgagtatatgctgtttttgtcttgctctatttactgctttatctctggctcttgaataagtacttagaatagagtgggcacttgagaaatacttgctgaaactgtgaatcttttttgccatgacaacacatcaggcaactcagaagttactccttcaagatctgctgagaaaggactccttttccccatagccattgaccaggaaaatctgggagcagttgttttgagtgtaaccacagcaacaggaggctgtgatttgggggtaggcggtctgactaatctctctaacattcttccttttgcctgggggctgtagtaggatatggaggtataaaacaaagaggataaaaatttgtatctaagaataacccatagcgaggtgaataaactgcagttaaacattctaagttaaatatcaccaagttaaacattcttactaagttaaatataaccaagttaaacattcttactaagttaaatatcaccaagttaaacattcttactaagttaaatatcactaagttaaacatcctttttgagaactatataagtgataatatttacatgagtatttggtgaagcattaaaccacgatccttcagagaactaaagtgactctgtatgtttattctgcaagttaccgcaagccagtcaacaagagacaacatcagattgaatgtgttatatttaaatgttcacttggacttgcctagctttaaaactgtttctataaagggaaaggtggatcgtgaatggtagctggagacttgagtgagctgtctgcgttgcttggtgtggtcatatggctttagataaacacgtgtgtctgttgacacatatttttatgccttacagtgggctaactttgtttgtgagtctgttcatccacttatcagcctctccaccacccattcattcatcaagcatttatcaactgctcagtgcgagcataccagcattctagacccaggggatgggaagaacgacatggcctgcgtacctgaagcgctcatgggaaaggagcataagaaggaaggagctgaatttggggagccttgaaatcatatggaaactggttgtggaaagatgcagagtggagcattcagggctggtgggaaagatagcattcctggcagaggcacggtgcagccacaggcaggccatgcgaagggttgggggtgccttcctacagccagagcatggggtgcctgaaggggtagccgagcaagcactggaaagccacgatcttacagcttagatgaatgggatccaatctattccaacccctcccctagtgttgtaaatacttttgtaataaaagcagtgcatgtttgttgtagcaaataaaaacataggcataaaaagtccctattcccagaaacccattagcagaatatctccattttagaaagacaatgtgcggagaacctggacacccagagaccagctctcaaaccattagaatcatcccagttagaagggccacaggcctgaacgatggggtggagaggagcagacagaccagaagactaagagtgagaaagaaaaaggagcacaaactccaccatcagttcctaataatatcaaaggagaagggaatagtcagggatgacgtagagatgtctagtaatgttgccattgaggtaaaaaatacagaatgcaaaataggtttaaggctaaaagtaatgagctgggttttgtgcacattaaataaaggagcccatgcgtcttctgtgtcacattcagtaaaccaatggcagtgtccatcgggcccaggaagaggaggctggagatgtcagtttgagagataccagcctttattgtgtggtcaagatcacgaatgaaaagagatttagcgtcattgtataaagtaagattagggctaagaatggaagcttggggaaaaacaaatattttacttgaatctgtgataaaatccataccatacacctctctagagaaaaatacaaatgcctgtgatgtatttacatagaattttagagaattcacagatgtactgattgcctagaactaaaaattctgttagaaagcagacagaggagaagatggacagtaaagatactggagttgtcaacaagctgagaggaaaactggaaagggccaaacctggagcgtgtctcagggaagggagtggtcctgacacccatcggagtagagaggcccaggaatgaaggctgggaaaaggccagtatgcggatggcctcactggcactcgtttctcagtcctgccaagtggccaactgcaatagagacacaagtgactgggagatagaaaacacagtaaacagttagtgtcggtgagtctttcaagaagtttggtagtgaaagaaagggatgaaagccaataacttgatggaaagcggtttatagacttgagagatgtgatttgttagtaggcagagaagactcagccacagaaagtgggtagtaaggaatggagagaattgagtcagttgataaagtagcatctggtaaggaactgggtggcagtgggcccgagtaccaggtaaggagagcctcagaaaagacaaggtatgcatcctcagagacatggaggaaagaagtccagatgcgtgaacataggggacatcattctggttagaggtagaaagattgggaaggccatgcttgttggcctcaggaatctgggcacatcagccttttctggtatctggagcagccatgacctgcaaggtataggagtggagctgtgtgtgttggtgaacagtggagaaagagagtccttagaatgaaaactctccacgtttcagtagatggggataacttctctccttgggtagtcaatattagctgccaggcagcctttcagttccatttatgaaagcattctttgaagtacctgccctgtggtaggtcctagaaattcaaagatgtttaagacagtccctgcctttggggagctcatcttcttcaccgggtagcttggtagctttgggtgagctttttatcgtgtctgcaacattatccactttgtgaattaatatggcatgtttttactcttcagctcacattcctctgatagtggataagagctgaggtaatgcagctttgttttaatataagcatttaaaaatctaatctggaaagtaattaaattccaggcttacatttttaaaaagagaatcttgtattactcaaggaatacgtcctcagtactatgtaggcatgttatcattgtaacacttaagagtgtggactgaaggttaaagcctctcctgtcccccacctccctccctgaggtcatggctgtgtgtgcaccacacttctctcttttaaaaaatgcattcattcccgtatgtgttcacactcacacatctatacctgtagctttttttctttaacatgaatggttcatactcctcatgttattttttgagatgggtctcacactgtcgcccaggctggagtgcagaggcgcaatcatggttcactgcagcctcgacctgctgggctcaaatgatcctcccacctcaccctcctgagtagctgcgactacaggccaccacatgcggctaattgttaaattttttgtccagatggggtctcattttgttgcccagactggtgttgaacttctggcctcacaacatcctcctgcctcagcctcccaaaatgctggaattgcaggcatgagccactgtgcccagcctaattatactgttttaacttgctctttttgtttagcagcaagtcttggaaacgtttctttgtacgtacagtaggcttaccttctggctgcataaatacttcataaggtgggtgtgctgggatgtatgttgttctctgacgatgggtgttgaggttgctgctttttctctttcccctttcacagtcgcaaatgtgtgtatgcacacggacaagtatttctttaaagcgtattcctagtaggagtttgctggatcagcgggggtatgcgataagagactgccagatcaccctccaaaaaggcttgagcactttgcactctggccagagcgcctgtttccccacactccagcaacgccggatattaagaatcttttacatcttcgttatgcctatagatgaggcatcagatttcgtggttgcctgagtttaagtctcttgaaatagggcctttgaagcaacacatggaaacggaaagcattcaaataaagtttttactaaaccttatggcatatgtaaatatttgtcaaaggtagttatttaaagcaaagtacttaaaattaaatttaaaaaatacttaatcctttatctgtggattctctttctccattttctagtttattccctccggtgtagactatggagtgagggctcctttaattagagttaattaactcttctcaattttgtcctgaagcacatgcctttatgaatatgacctccacccccacaccgccccttccatgcagcgggattcaaaacctctcatctgaggagcattgagttttaattaaatatgtgtgtgtgcgcgtgtgttcgtattttaaaaccccaaagtaaattagtcagcctccctggtgcatctaaatatttaatttgattttcttcctagtagtttctgcccactttcctttttattttaagataaatttactaataatttaggttcttcccctgggagccttctgcattctacactgagtaattctacccactttcaacattgtaaagcctgtatctattttcttagcaatcacaagtttggggattgtttttatctgcttgttccaattagattttcccctagaatcctttactatacaccaatgaaaaagtcccccatggctgtcagacctaaagtaaagcctaggcagggaaaagaagcaggggcggggcagggagcgggggaggggagaggagggggagggaaaggccaattctgccatcctcctctgccacctgccagtgtcctggaagaaacatgctgagaagcgcatgcagtgtggtgttctgccttttgtttttctgttcaataaggaattttcaggtgttcctacagcagtgtctacttaggtcatctctgaccgaagtcacactcaagaagcaggctgtggaactgctgggttagcaaacgctttcagtaaactgactttcaaagggagggaagtggaacttctttaatgtagaaacctccacacacggtctctgtctgtgtctgatcttctgccatggtttgttccaaaactcagcttgtctttccaaatagcctagacagaacaagtttttacaagtgcacattgaaagtacattgagagaaaccccagaatgtgtatgccctatcatggaggaagtaaggtcattcttaacagagtaataattgctcacaatttactggcaaagtctttttcttcctaaattagtgttttctgtataccatcttctctcagtggttccatagttattcagaattcctgttaacttttttttttaagtgaaagcaagtttattaagaaagtaaaggaataaaagaatggctactccataggcacagcagccctgttaactttgaaacctcagagtttatagctatgaaaagaaagaagaagaatgacatgaacaggttgagggatttgctgaggctcacataattcacatgcatgccagagtccgtttacacttcacttttgaattgttcggaaaaaaaaaaaaaaagctaaccgaaatcttcatttcattccgtttgtcatgtggaagcttgtcattgagaatacttaatggacaagtttcctgaacaaaactgtgtaaatcaagtatggcctgacacttgcctggaaaccagcaattctgaaattggaatcctgcttagaactgaatccttacgtggcctgcagcaagtcatttcacatcttacctcccttttttgccatctataaaggataaatacttctgtctcagggatgttgaaaggattaattagttagtctataaataactttgaagatgaaaagtactttaaaagtgcttcttaataacattattgcttagaaaagagtgccacttttatgctaaccactttatgtctcaaattatataaagaaggtatgtttagtacattactacgagttgtaaactagagataaatttcacatggtgtgagcatcaaacattagcttcagaatttcaaagaagcatcactttgtcttaaggatcatttaggagctgtgctctcagtaattagttacaaagatcatatttcagggaaaaaaagactctttcacacagttcagcctttttctttcttcagtcaggtttcttagccatcactttaaagggctgcattgaatttgatctggggcagggaggacaggagacagtatactatttttgaggagggaacagaatagaagagaaccatattctttgtcttccctcgcatctctctcaatcttatcagggggataggaatctattgctttagccatttctagaaaagttagagtaactgtttaaacttactgaaaatatatatcattaggcttaattcagtttatttccctctaaaccaagttaacaaaaagggccagtgttctagtttataataaaacattataacttgcagtgaagtttcattttataatgggtacaaaattcaaacttaacctctttattggaaagcagagggggattgtgttaattacacagatgacagtgaaatgcagggcacagcagactgtaacagagacacagattatataaagagagcctagaaaaatttggaaaatgtgatcaagaaatgaaatgagatttaaatttggaataaagtatgtcagaaagagtaagtcaagtaagaaactaaaaggaaaggtacctggagagatagcagtggctagagctgaatcaggtacagttacccaaagtgtaattgcttttgttttctctcagcgtcatcagacagattcatgtttcaagctgttcatgctgtgggatgatggcttgcagtctacggagttaagactgagtgaaggaaaaacgagaattatcatagctcttctctgtggcttgacctggaggacttaatttgtgctcattcctttgtaaaaggtggacgagtggccaaattactcacatacctaatttgtgtattgtttaaatatatcattatatcataaatgccattgaccattatgatcaattacaggcttcaggagtagattgctctttgcatttggtcttcagaaatatgattgattttagtaagaaaagtagcaggcattgaagtgtttggtcctgccacttaagatattaaattagtgggtgtttttgccagccattgttttacagtctatctctggaatatgaataatgactatttgaatgcacctaattctttcaatttattgtgttaaatgaatgatattttctgtttacatgtgtaaacatttttcttcgctatcaattctaatcaaaacttgtttcaaatggtaaattaaaacataattttgattaatgtggcattcttttgaatttcccatagcaaaacccttgaagatcgtttgaaaattgaagcaaaaaatgggacattgagtgtatccgacaccaccgttggcagcaaacaattgacattcacgttaaagagggtgagttgtcttttattgttattttttaattcacaaaagaaaaatagcctttcaatagtgtttgtgtgtgtgtcctcagagcagccttctcaatgcttttcccctattgaggaagctgtgttccctgttctaacattttccttgcaaccagagcccctggtgggccaagagcacagtgtgtgactgcagcagagccaggaatgtcactggtgttccaagggagacagggagttagtggccctggagttagctctgttggagatgaaccagccatcttggtttctggattgctctgtagcctcaggtgcggcttataaagcaaaagtcccatcctgaccctctaaagatgtagggctactacatcctgaccctctgaggatgtagggctacctcgcatgtatatggactttgaagaagaccgggaattggcgagttctgataacttgtgacagtcacacccagcttgcccagatactatccttttagaagacagactactctgcccgtggtcattctattctaaattgatttataagatcctttttttttagccagtggtaataatacgtgtcacacattgtaggaggagtaagctgcttaaatatttactgttaactggatacagttttatttctcaaaaaatttttttctcattcaaagtcagtcctcttcaatatagtcaccaaatagaacagaatgacaaagatttcatccctttttttttccttaagcagtagtagggagattattcttttttaaaattgagatataattcacagaccatatgcatccttttaaagtgtacaattcagtggttcttagtgtattcactgagttgggcaaccatcacactgtgtaattccagaacattttcatcaccccagaaagaagccctataccctttagcatttacccccatcttttcatccgccagcccctggcaaccactaatctacttcctgtctccatagctttgcctgttccgggcatttcatacaaatggaatcattcaatgtgaagtctttcatagctggcttctttcactgatcataatgttttcaaggtttattcattcagtggtgtagcttgcattggaattgcatttctttttatggctcaataatataccattgtacgtatataacacattttgctattcattcgttttttaagggacacgggttgtgttcttttggggtaagcgattaataattggctgtgaaaatgaatgtgtaaatttttgcatgaacatgtgtttttatttatcttgggtctatacctaggagcagaattgctagtgtagctatttaactttttgagaaacctgtcagactgttttctgacagtggctgcaccattttacattcccaccaagcagcgtatgagggttgcaggttttccacatccacaccaaacctgtctctgtcggtcatctttattatagccatgctagtgggtgtgagtggtgtgttgtttgatttgcaggtccctaatgactaatgagttgagcattttatcatgtgcttattggtcatttgtgtgtcatctctggagaactacctcatcacatcctgtacccattcatctctgatttctctaaaattttcccaacgtgcatccaggaggcttgccaagtaataaaaaacttcattattctaagtgcaaaaagcttttcagttaattctgtctgctgagagcaaatttgccctcttacatttatcacttacgtaagccaaatacacattcagagggacctcattgtgcctgttcctaatttcttatcaattttctttatacctggaaacattcgttgattccctctgaaactcaagtgatgtcaaatggggcaggagcagcacagcctggaaggatcccaggtctgcagcacagccacctcagctcctgcagaggcccctctgctgggttgagtgagcacctaccttgcagtaacatgaaaatacaagccttttcccactgtttctaaatcgggaggtactgagttgaagatcagtttaaaatttgtagtaaaatgaaaataagatggctctgaaattatatttttgtttataaaaaaagtattaagaattgctttaaatggcctcataactgaatcaagcagaggctttgaaactgttttgaggactgtgtcaattaatgtttgatgtgtgtgtttccttacttgacagacattttaattattaaatctcagttttacttgagttctagtttacagtaaattttacttattcgggcagttgttcatagaagtctctttttatactgcatgttagatatgctcaggtagaatcttgagtttttcctatgtttgcatatgtacctcctaaaatttcaataaaattgaagagagaaaatccatgctttaatgtcgtttaaaattgtatagtggcaaaactgggattcagtcacaaatctaattttaaaatgccatttagtacagttcctcatcaagcctgagactgttgctgatacaaatgtgcctgtttgcacctgtcctcctcctccctctgtgacaggagtgctggaggctgtggtgaagtagtcgggaagaggaggcagaagcacccaggagaagcgctaatggcccatagatcccatcctcctgaatccgccacatggcggcaaggccttccagatgccgccttgggagagaggctagtcatagtcctttttctgcatggaaatttgtctgcagaacaatagtcactgcttacaagctcctcttgaagctcctaccttggtggagaaagtctggcagagcttcccaaaatgtgttccaggagatgtaaatggtgactctggaagattacttttgccatcagacagataagggaaaaaccttggactgatgtccatgttgaagacttatgaaggtaccttaacttagaagctccaacacacacaccttgtttatctgtatttagcacatgattttccaaaattatatgaagaaaccctttttttttttttttttgagacagagtctcgctctattgcccaggctggagtgcagtggcaccatctctgctcaatgcacgctccacctcccgggttcacgccattctcctgcctcagcctcccgagtagctgggactacaggcagctgccaccatgcccagctaattttttgtatttttagtagagacacggtttcaccgtgttagccaggatgatcttgatctcctgacctcatgatccacccatctcagcctcccaaagtgctgggattacaggtgtaagccaccacatctggcctgaagaaaccctttttaaataaacccctgattaacatgaagaatcgaaatattgagtaactggtgttggttcactttacagggctcctggtggtgtcatcacttgctcagctagggagtattagaaggagttctgagttttccattaacgcatgtgtattgatgcctgccctgtgctgcatgctagggacagacatggctcttgccaccacagttctcagtctactgggagagagagacagcgggtaaaaattatacacctctaattatatcattagaactgcggcaagtgcttcaaaggagagcagagggctgtgagagtgtttggtaagggaccaaactgcacagtttcagtaagcacaggactgaactgacatagtatttctattttttttaaatccttccggttgctgcatggagagttgcctcaagggatatttgaaaggaagcagagcacgaggaaggcagctccgtggtggccatgcttaggagcggcagcagcctgggcttgggtgggaccctttgagacggagcacagtggaggagtttgggacgcacttcagaagaatacacaggacaggatttactttgaaaagacagttgaagaatagtaatagtcagagaagggacttaagaattatgcagaaacccggtttaagaacttattagaatgggagaaatgcatcctttttttttttttttttgacattacaaattgctttccttccccgctattctctcacttgcaactcttcaattttagaagagtgggtaatatccacaagaggtgaatccactggacactttctcctcaagggtaacacacagatgcatgtgttttgttaggtgtgtagaaaatacagatcctggctgggcacggtggcgcacgcctgtaatcccagcactttaggaggccaaggtgggtggatcacaaagtcaagagatcgagaccatcctggacaacatggtgaaaccccatctctactaaaaatacaaaaattagccgggcgtggtggcgggtgcctgtagtcccagctactctggaggctgaggcaggggaatcgcttgaatccgggaggcagaggttgcagtgagtcgagattgtaccattgcactccagcctggcaacagagcaagactccatctcaaaaaaaaagaaaatacagatcccagagaagcaggttccctgggtgtccataagacggtgcttttccgctttatcaactgaggcccctgacagtgctttctcagtttaccatgtgtgcagttccaccgctaagaaatttttttttttttgagctttaccttcaggagtttgtattttcaaaaccatcaaatgtgtttttaaaaccgtgtaactcttaacctttgttgtggattctgcactgatgctcttctaagaatttctgctgaaagtagttaaaccatttggcgccagggatggggtagggaggagttccagctcccatgtgagccaatgagcattgaggacaaatgtgagcacctttccagcagtcagcccgagagtccacatggttattgcagctgtgaacgtgtgcatcgtctgcctggcttttatcagtgattaatgagagcagtttgctgcttttaaggagaagtggagttttgggaaacagctaaaaattctttggagcaagttctagtgaatgaatgctttaataacgtacttttagtacatttaagtattttttgtttttaaaaacagtgggaataaactaatggctctagtttgtaaacaaagatctctaaaaggaagtggacactctaagtgatatcatcttcttaaggtggctcttgtgtaggctcttttaaaacatcccagtggttgtgtgagtgtgttggttgaaaaaccagtctcctactttgtaggaggctggtctgtcagggcccttctcttgcctggggttcagaatttctgcttttgcattgatggtaaaagttggccttggtcctgctgtttctgccagggtagcatttgtcagagcagagtccaggcagccccaccatgtcccctggagcctgtgggcagcatttctcctggcagcagttctgagattggtggtggtactgttggcagcctgacggttaccagaaaagaggtatagaattttctctctttccctctactcatttcattttctcttttagtctgaacagcagaagaagcaacaggaggctgagaaactgcatcgacaagaaaggaaaagactccgtcgttcggccggacacctgaagtcaagacacaaaagaggacggtcgtttcattgatttgggaagtggtcctacctgtgattagggaggggtacgtctcccccaaactgatcatcgttagggtgttaaacacagacgaggaaacacacgtttttaaagttcatgtacgttcttgtacacagaggtaaagatttgaaaacctgtgccttgtgggttggactttgaagctggccccgccgacggccaccgcacagccccaggggtgtgcttgcgagtcgttgctccctggaaacattgtcctttccccacggctttaatcatgaaaaccaggctggggtttttttaatattgtgaaatgtacaccatgaaatgaaaggtttatcctgtgccagaaaccaaggtttatcatgctctaggaacttttttcttacactgcctaccgccattcatgattaaaccatccagaaataccatccctgttttacctggtgtctgtgtattgcctgtgtttgtgtttataagtttatgctgataggtttgttcggcttgtttatgtattagtttgggatttgtttttaaataatttataccaagagagtataatctaatggtgcaggttgagagcatcccaaatccgaaaatctaaaactgtttgagcactgtatttatctgttcttgcactgctataaagaactacctgaaactgggtaatttataagtaaagaaaagaggtttaattgactcacagttctacaggtggtacaggaagcatggctgtggaggccctgggaagcttacaatcgtggcagaaggtgaagcggaagcaggtatgtcctgcgtggctagagccagaggaggagggcaaaggggcagatgctgcacactttcaaacaccagatctccaagaactcactaacacagaatagcaagggggaagtctgcccccatgtttcagtcacctccctccaggcccctcctccaacaccgaagattacaatttgacatgagatttgtgtggggacacagagcaaaaccatatcaagcactgacatgacattggaggaaaatgctcattagagcttttcaggttttggattttcagatttgggatacttgactagtaaatataatacagatattccaaaacacacaaaaaaaccaaagtctaaaagacttctggtcccaagcatttcagataagggatacccaacctgtaataatgggaaacaagcagtagaggctgttggttaatcttggcacaagtttaattacaggttttttttttttcctgtttcttaagtacagtcaaacataaacttactggaggaaacatttataaaaataaatatactttcatttgaatagcttctttgagaaagactccaagaaaatttttttttcattagtcaaacggtggtgtgcacttgtagtcccagctactgaggctgaggtgggttgcttgagcctgagaagtcgaggccagcctggacgacagagcaagacctgcgtctcaaaaaaagaaagaagagaaccaactttggtttccttagtttttccagctttgatgtgattttggaggtgcctttatagatttttaaggttctttatatacaactgaaatagtaactctttggactgtgaatgatacagcctaatttcgaatagcataagccgagaggcagaatgcattaatttacatcaccatgcttgggacatggaactggcctcaggaacacctagatccatggctccacggtcagtcagctagcacatgcgcactctatctctgtttccctctttctctctctctccttcccctactccctcccttcctcctcctgtctcaccattgttccttctctcttcaggcctcccctgctgtcttttccctatgtgtttcccgtccccctgcctctgctctctgtgctgcttctgcttctgtgcagattggcttgttcccaaggcagggaacagctcagccatgtgtccacttctgtggtccgagaaatgaggtctgtttacagaaaaaaggtgtgtggaaggtggggtatgtgtgtatgttcttgttcctggggcacccagccccatttgtgctgtggtaccagggagtcctccagctgttccaacccctggaccggtactgtcctttttcagcttctttccccctaaactcttgctcactgtccacctcttctcaaaggaagtggctgcagcttcctgttgccttctcttctctgtttctacgctgcctccctcagggatggggggttttaaaaatttagagagggacattttgctggctggaatgtccccaggggttgggtgtttatgcccttggcctgtttcctgacgtcagggtctgtcacgtctactcctggctttcccaggcccctcttttccttccttcttgaagggcctcctggttctgtggggagccagtattccgcagggccagattccacaggcagcggtgctctctgttcacccagcactgtcagcacaccaggaggtcaggacatcagggtagaggaggagggccaggatcacttctgggcacctgggaggctggcagtttagtagaaagagcttgcatttggaaccaccctgacacagggtcgaattccaggtctgttgcctactagttctgtgtcttttgactgttgccttaatctctgtgaatctcatttcctcctgtagatcagcctaatacttagtttttattagagtaaaatgaggcacttacattaggtacagcacctggcactgtgcaaggctcatgaggatttgacaaagcttcttgaccattgagggttttcaagagcaggggaggtgacctcggcttttgttctggagagttgctgaagggcaggcggagggactgccctgagtctgagggacacagaaggagtgtccgctgacgacagctatatgggtactcctcctaggcctgacccgtccctcattgccccagttttcctaccgattcagcccttaacgcaggcctgcctcttcagggctgattcccagcgtgcctgctctaatccttcatgtcttcgaagtttcctgtttccaagttttattcagctttcatactctactccataatttttccgtgtgtgtgatatactactcactagtcctaggaaatggccatttcccatgggtctctgtcccaggcacgcacagctgggggtgttcatgagccagtgcgagaagcatttcctcacagatggggccccgagggcatggcttttacagcgggactgagctgggggttcctgggctgccatttctccccttcccctgctccagatcccctcagcctctgacaccccagacctaaggcccaagtttgtttatttgtttccaagtttgtgctcagcagttaggataatggtggctttggagagaggggggaacatggctgggagggacgtgatgggggatcctgtttggtcttgttccctcacctggtggtggcttttcccacgggcgcactttgatcactcctgggctgctcacgactcatgtctctttctctgtgcttgttatccttgaacacaaagtttcattgaaaaagaattactcgtgttagccaggatggtctcgatctcctgacctcgtgatctgcccccctcggcctcccagagtgctgggattacacaatgaaaccctgtctctactaaaaatacaaaaaattagctgagtgtggtgacaggcacctgtagtcccagctactctggagactgaggcaggagaatggcgtgaacctgggaggcagagcttgcagtgagccgagattgcgccaccgcactccagcctgggcgacagagtgagactccgtctcaaaaaaaataaaaagaaaggaaaaaaaaaaagaaaaagaattgctttatcgaagggacatgtttcatggctcctcacaaaaccatttctatagataactcataacactgtaaggttatgttttttagatatttttctgttctatagacaatgatagacacatctgttttaataatacaaatgggatcacactatatatgctgttcctgaacttgatttttgtaactaacaatatattagagatattttcccaggtctatacatattaatatgtagggtgatctacctcattcttttgtatagagtatttcattacatggctgacccataatttatttaactctctgtctacatacagttcaacctaaaaatctaaagaaataaccttttaaaatcttttttcaaaaaaagtttacattcaaggagacacgtgcttgtttgtgagatgggcatattgcacactggtgaggagtgggcttccaatgcacccgttacccaaatagtggacactgcatccagtaggcagttcctcaacccttaccaccctcccagcctttggggttccctgtgtctgttatttccatctttttttttctttttctttctttttttttttttttttttgagacagagtctcgttctgtcacccaggctggagtccaatggtgcaatctcagctcactgcaacctccgcctcccgggttcaagtgattctcctgcctcagcctcctgagtagctgagactacaggcacccaccaccatacccagctaatttttgtatttttagtagaaacaaggtttcaccatgttggccagactggtctcgaactcttgacctcaggcgatccacctgcctcggcctcccaaagtgctgggattacaggcatgagccaccatgcccggccagttatttccatctttatgaccatgtgtacccataaaaatcatttctatagtaagtataacccaagttattttttaaatgaatgtagtaactttgcaaagcatttgtatgtagtaaaacaatggaaatgtcatttcggttatcattttctttctttttttcactatatggagcttgatagttttaactccaccagttagaatagagttttagcatcttttttattcatttgtcagaagagcagaaacaaatactttataacatttttgttataaagtaacaaaaacaatcttcataacattctcttaagtaccatttatggtacaacaattgaaattattaaagttcctgggacatttctatggatttcccatctcttacgaataaccccgtgttattcttcagctacaggagagggtggggtgcgtggggctggggcagaagcaggagatcacttgggaagcgccatagcatcgtgggtgggtgatggggctggcccaggggtaacaagggtagagccccaataggttttgcaggtaggattgacaggatgtggaggagaggagccaggcatagctctgacatatttggccttagcaatgccaaaggtgggactgtccttgcctggtaccacaaaaaccacagcagaaataagtttgggggtgaggaggtaatgagggattctgttttgaccagaatcagcttattttattatgtacgtattatttatatggggacaggttctcactctgttgcccgggctactgtgcagtggcatgatcacagctcgttgcagcctcaacctccagggctcaagtgatcctcccccctcagcctcccaaagtgctgggattacaggcatgagccattttatttttttttatttatttattgtttttagagacgggcttgctatgtcgctcaggctggtcttgaactcctggcctccagtgctcctcccacgtcagccactcaagtagctggaattgcagacttattttagattgaatgcttttcatttttctctttttgaaacaccctgtggttcatgttcttactcagagtaacagtccatgtccccatagcagcccacaaggcaccacgtggccccggctggcctgtccagtgctctcccctccgtccgctcgtcctctgcatgctggcctccctgtcatttctagaacactcaggcattctcttaagccaaggcctttgtagttgtgattccctctgcatggaatgctcttccccagccatctcctgtcactctctcacccaccccatgaggtcatgaccacgctatttagattgtcacaccccatctcctggattgcagatgagatgatatgcaatgtgctttttaaaaagactactatggacaatgtctaacatataccaaagtagagacaaatttaatgtgcttccatattcccagcacctgcttcagtagtcaacagtagctgaccctgtttcatcctcacttctacccattgtcccattattttgaaatatttgatccccagacgtcctattgtttcattcataaatcttcatagtggcttacttgtttatggttgattcgccagccccactcccttccatagcagcctagtaagggtagggatgtgggtttggatgcgttttgctcattgctgtgtatccagcatctagaacaatgtctggcacctcgtagctacttatcaatatttattagatgaataattaggtcaagtttgatgaagcctgaagattgaactctggctttaatacaagaggggtattaaatgttttgactgcagctgtttgagaggggctgggaatgctgaaaagcctaattggaatagttgaggagagaatggggaaaaggaatcagaaatagcgattatgcacaacagctgatacaggggaacagaaaataggacatctgagatcaagagagagctttctttaagagggtagatattatagcctgtctgtgtgcccctgggaatgatcaggaaagactgaaagcgatgatgccagacagagggcagctcctggagtgatgtcaggaagtccgtgtggtggtgctctgtcgctgcataacaaactacccactacttagaggtttaaaaattaaaagcaagttagctcacagtttcagtcgatcaggaatccagcttagcagggtgattctgtccaagttcctcctgagggtacagtcatctaaaagcttgtccggggctagaagaaccctcttccaagcttccacacatggcttttggcaggcggccattgttccttgccacatggcctctccacagggctgcttgaatgtcctcacagcatggctgacttcccccagagcaagccatccaagagagcaagagactaagatgggaaccacagtgtcttttgtgacctagtattagaagttgcatgtcatcccttactctgatttgttagaagggagtcactaagtacaaagtagggtggccagacatccaaataaagataaacaaaggcttattagtataggtgtattccaaatattgcatagggaattcttacactaaataatgactttatctgaaactcaaagttaatgtatgacctgtatttttatttgttagatttggcaacttcagaaggaatttgtggacatacttttaaactacggctagccaaagggaatgggatgtagtgcatatgtagagctcaggcctacagaaacacggcagatcatagggagagggctggcggagtacttggcaaatgtagataggtaggcgggtgggtaggcagaggcagtgaggggagcaggtggacatgctcttctgattgcttctcttttctcaccggagtaagcagcaaggttatgggcaaggtaaccttctcccgccccgccatacaccttgcacagagcttacccttgactcagaccctccatgctgggggaattacctccctgtgaccatcctaggaagacacctcttggctcttgcagagtcagaaaagcacaggacatggagttgagaaacccggtttcttctttttcttctttttcttttttttgagatggagtctcgctctgttgcccaggctggagtacagtggcacaatctcggctcactgcaacctccacctcccgggttcaagtgattctcctgtctcagcctcctgagtagctgggattacaggcacacgctgccatgaccagctaattttttgtattttagtagagatggggtttcactgttgttgcccaggctggtctcgaactcctgagctcaggcagtctacccaccttggcctcccaaagtgctaggattacaagtgtgagccaccgcacctggcctgctttttcttttccctgttatggcctctctgggtttccaaaattctatctcttttttctcttttttttttttttttttttgatggagtctcactctgtcaccaggttggagtgcagtggcacaatcttggctcactgcaacctctgcttcccaggttcaagtaattctcctgcctcagcctcccgagtagttgggcctacaggcatgcatcaccacgcccagctaatgttttcgtatatttagtagagacagggtttcaccatgttggccaagatggtttcaatctcctgacctcgtgatccacccgcctcagcctcccaaagtgctaggattacaggcgtgggccacctcgcctggcaaaatttttttttttttttttttttttttttgagacagtgtctcactctgtcgcccaggctggggtgcagtgacgcgatcttggctcactgcaacctccgcctcccgggttcaagtgattcttgtgcttcagcctccctcaatgttttttttactttgtcccacagtaagaaatccatttgacatcatggtgcagaatacacgtacatcaaaggtattagaaaattgttatcttgcatcatacaaaggacgctgttatttttctatccagtcctgctctagttcctttacacctccccccaaaaaagttcacacccattactatggttccaccacccactaatgagggctccaaccccgagttgagaatcactgcctactaccctaatcaactgatggcattcttgcaggagtatgttgacaaagcccatactgaaatgtgtcccccaaatgtgtaattcttcctattgtaatgtgataaattgtgtaatgaaacgttttgctggagttttatgagaattttttttgactgaagacacgagatgagtttttaattatttttttcaaagctctattttcagcataaattaagtacaaaatatattttatggaatagttatagggttttttaggaaaatttaaaagattttgtggttctttctaaggaaaactttcaatgtgttaaaaacctatccagggcctggtgcagtggctcacgcctgtaatcccagcactttgggaggctgagacaggcagatcgcttgaggccaggagttcaagactagcctggtcaacatggtgaaaccccatctctactaaaaatacaaaaaaattagccagatgtggtggcaggtgcctatagttccagctactcaggagactgaggcaggagaatcacctgaacctgggaggcagaggttgcagtgagccaagatcgcgccactgcactccagcctgggcaacagagcaaaactccgtctcaaaaaaataaaaaataaaaacctgtccaggttttttgtttgataaattttgtttttgaaatgattttcaaacctaactttacccatgtagccatgaagttaaaacaaaatcctagagtttatgctgtcattgtaagcaattacagatgatggccattacaaaacttcattttactctttgtggaagactagtctccatttcatatgcaatagaagattcaactctcttttgcacttgagaatactaaaagtaaatgtattttagtaaagaaaaaaaacccacatgtaaatgaatgtgtgtcttggagcaactgaattctattcaaaactttggaaggaaacagcaaagtgttagaatacgtgatttttaaagtgtatgtataaataaataccgtgagtaaatatttgcttatttctttgacatccctaaaaagtttatatatacaagttggcataattttttttcttccccttgggaaatagtgtaattgcctttatttggagtttccttatattaaccatttataattatagtagcttgatttaggacattacacatctctttgaacgtggggaaattttcagtcctgaaaatttttatcttacaattttttttattaacgtgtacattttccaaaattaatgcaataacaaatctgacagttaatatttgaaagaactattttggccagcatgctgcctcctactcaaaacatctgatgttccccatgagcacatactgggtgaatggaaacttctaagaaaatgtcagtccttacccttggagataggacggcctgaggcaggagtgtcaggagggacacaggtcaccatgctggtgcgggctccgggtgtgcagctccctgcagggggtggaaccctccccactccctgggcatcctgcccaatgagagtcccagatgcacatcttaatgcacgaggaagttattattctctcactgttgtcagttgcagaccctgtttgtgactattctgtaaacccagatggaacttcaaagcggtagggtggagggaggccaactatatttttctggtagccttaggtttctttccaatgtaggacaaaatcacgaatctcagcctctcaggatttgagggatcttctagttgaactggctgagacgcctacctgattggatttcccgagttgccttctctcccatttcagatgatctcattgtgagttgagatttggagaatcaaaacctccctccccgccctttccctagcttcctcctgcccttgctaggtctgccttccagggttctgcagaactgctctgatttctcctggcgctcccttctctgtccccatttccctctgcacatcacccctttccttgctgggacccacctccagtcccctccactcaccactcaagctcgtgggagaggaagctcatctcctgatctccagccttgctagcctccctgggagcttcgacacggcctccatttccctcttgtcctcggcctccttggtctctgccgactcctcatcctcacccacgcaggtgttaacatgctccaggatgtcttctttaagcctgtcactcttccttccatagtgtcacctctcttcagtgtcccagagctgcctcccagatagcctctgggcctttcatctgggtggccgctggcaccttgagttccacatgctcaaagcaaaactcatccaccccatcccacccacccgaacacttgctgctactcctcattcgcccgtctatcaacctgagccagaagtcacagttcctgcaagcactacttatcgagcactctgcagttgactcagcaaaaagagccgtttacttgagtttatgtttcacgggggagacagacgatgcatccagtagacacaatgcaggccacacgagccattgggcaggcaggagagctgggagggcagggctg

SEQ ID NO: 1700 - DNA, 5196 bp, Homo sapiens
ttttcaagagatagggtcttgctgtgttgcccaagctggagtacagtgttagtcacaggcatgatcccattactggtgagcatgggagttttgacttgctccatttctgacctgagccgcttcacacctccttaggtaacatggtggtccctggctcttgtggggtcaccatattgatgccaaactgaggacacccaacgctcgttgcgtgctacagccaagaactcctgggctcaagtgattctcctgcttcggcttcactagtagctaggacaataggcctgcaccaccaagccaagccagagtctgtgatctaaccattctattatgccacctttcccaaagatgtttacagtttttcttaactgtaaccagtgtagaaaattaaaaatttgtggaggatcttaaatttgaggacagagttaaggaatatatccctacgtacatggctaaatgtaaatatgtagcaatgcctaatagaggccaggcactgttctggtactctgggtaggggtggatggggtggatagggaatataaggacaaatgatatagggtccacgaagaactctcaacctaattctgatgcaatgtggtgttggtatttgagagtttccaaaatgttgtgggtaggagagcaaaacaataatatttgggttttagaaagtaaggcataaaataatttgttcattaaatcaaaggaagtaagaagatcacttgggaaagttataatccaaaaatagttaagtatttgagtttcagcaggaggaatgaaaacagattactttaaggaaatatttcataattagaaatatccaggtttagatactgaaagtgagggccagagataggaatgggttgaagatgacgccacagtcttcttttttttttttttttttttttgagacggagtctcactctgttgcccaggctggactgcagtggcacgatctcagctgacggcaacctctgcctcccgggttcaggcgattcccccacctcagccttcagagtagctgagattacaggcgcgcgccaccaggcccgactgatttttgtatttttagtagagacggggtttcaccatcttggctaggctggtcttgaactcctgacctcaggtgatccgcccgcctcggcctcccaaagtgttaggattacaggcgtgagccaccgcacccggcctacagtacttctaacgtaacatcgcagaaacactggaggagagaagagaatacacttccactcggaattcgcaccctggtcgccttcattcgctgggttcactcgctgaactgcctcgcccccgcccgggaggatgacatctcggcctgggcagagactcgaaagcctcctcctgccgctcgggatgctaacagcagggagagctgtgtctagtttttttttttttttttttttttttgagagggaatctcgctctgtcccccaggctggagtgcagcggcgcgatctcagctcactgcaacctccgcctcccaggttcaagcaattctcctgcctcaacctcccgtgtagctgggactacagatgccggccaccacgcaaggctaatttttttgtatttttagtagagacggggtttcaccatattggtcaggctggtctcgaactcccgacctcaggtgatccgcccgcctcagcctcccaaagtgctgggattacaggcgtgagccaccgcgcccggcttgtgtctagtcttgcccgtagcagcgtcgccgacagccacgccgggttgtcagagcctcactagtttttctcccggccgccgctcttcccggattcagccaccttccctcttccgggaacttgcccgcgtgttccggctccaggaagtgcgtcatcagtcggcgccagcggccgcacgccgcggagcaggggctcggaggtcccgggattacggtgctcgagcacgctggtgggaaaggacccgggacttgaacagtgttgtgcggcgccatgcaggtctccagcctcaatgaggtgaagatttacagcctcagctgcggcaagtcccttcctgagtggctttctgataggaagaagagagcgctacagaagaaagatgtagatgtccgtaggagaattgaacttattcaggactttgaaatgcctactgtgtgtaccactattaaggtgtcaaaagatggacagtacattttagcaactggaacatataaacctcgggttcgatgttatgacacctatcaattatccttgaagtttgaaaggtgtttagattcagaagttgtcacctttgaaattttgtctgatgactactcaaagattgtcttcttacataatgatagatacattgaatttcattcgcaatcaggtttttactacaaaaccagaataccaaagtttgggagagatttctcttaccactatccatcctgtgacttgtactttgttggtgcaagttctgaagtttataggttaaacttagaacaaggacgatacctgaatcctctacaaactgatgctgcggagaataatgtttgtgacataaattcagtgcatggcttgtttgccacaggaaccatagagggtagagtggagtgctgggacccaagaactcgaaacagagttggcctgttagactgcgccttaaacagtgtcacagcagattcagagataaacagtttaccaacaatctctgctttgaaatttaatggtgccttgaccatggcagttggaacaaccacagggcagggaaaaatatttacttccttggagccagagcatgaccttaatgatgtttgtctctaccccaactcaggcatgcttctgacggccaatgaaacccccaagatgggcatctattacattccagttttgggtcctgctcctcggtggtgttccttcttagacaacttgaccgaagaattagaagagaatccagaaagcacagtctatgatgattataaatttgtcaccaagaaagaccttgaaaatttagggctcacccacctcattggatctcctttcctccgggcatatatgcatgggtttttcatggatataagactctatcacaaggtgaaactgatggtaaatccatttgcttatgaagaatataggaaagataaaatacgacagaaaatagaagaaacacgtgcacagagagtccagttaaagaaattgccaaaagttaacaaagagctggcacttaaattaattgaggaagaagaggagaagcagaaatctacatggaaaaagaaagttaagagtcttcctaatattctcaccgatgatcgatttaaagttatgtttgagaaccctgacttccaagtagatgaagagagtgaagaatttaggcttctgaatccacttgtttcaaaaattagtgaaaaaaggaagaagaaactaagactcttagagcaacaagaacttcgtgaaaaagaagaggaggaagagccggaaggaaaaccaagtgatgcagaaagttcggagagttcagatgatgaaaaagcctgggttgaagaggtcaggaagcaacgcagactcctccagcaggaggaaaaagtgaagcggcaggaacgactcaaggaggaccagcagacagtcctaaagccccagttttatgagatcaaagcaggagaagaatttagaagcttcaaagattctgccacaaagcagaaactgatgaacaaaacccttgaagatcgtttgaaaattgaagcaaaaaatgggacattgagtgtatccgacaccaccgttggcagcaaacaattgacattcacgttaaagaggtctgaacagcagaagaagcaacaggaggctgagaaactgcatcgacaagaaaggaaaagactccgtcgttcggccggacacctgaagtcaagacacaaaagaggacggtcgtttcattgatttgggaagtggtcctacctgtgattagggaggggtacgtctcccccaaactgatcatcgttagggtgttaaacacagacgaggaaacacacgtttttaaagttcatgtacgttcttgtacacagaggtaaagatttgaaaacctgtgccttgtgggttggactttgaagctggccccgccgacggccaccgcacagccccaggggtgtgcttgcgagtcgttgctccctggaaacattgtcctttccccacggctttaatcatgaaaaccaggctggggtttttttaatattgtgaaatgtacaccatgaaatgaaaggtttatcctgtgccagaaaccaaggtttatcatgctctaggaacttttttcttacactgcctaccgccattcatgattaaaccatccagaaataccatccctgttttacctggtgtctgtgtattgcctgtgtttgtgtttataagtttatgctgataggtttgttcggcttgtttatgtattagtttgggatttgtttttaaataatttataccaagagagtataatctaatggtgcaggttgagagcatcccaaatccgaaaatctaaaactgtttgagcactgtatttatctgttcttgcactgctataaagaactacctgaaactgggtaatttataagtaaagaaaagaggtttaattgactcacagttctacaggtggtacaggaagcatggctgtggaggccctgggaagcttacaatcgtggcagaaggtgaagcggaagcaggtatgtcctgcgtggctagagccagaggaggagggcaaaggggcagatgctgcacactttcaaacaccagatctccaagaactcactaacacagaatagcaagggggaagtctgcccccatgtttcagtcacctccctccaggcccctcctccaacaccgaagattacaatttgacatgagatttgtgtggggacacagagcaaaaccatatcaagcactgacatgacattggaggaaaatgctcattagagcttttcaggttttggattttcagatttgggatacttgactagtaaatataatacagatattccaaaacacacaaaaaaaccaaagtctaaaagacttctggtcccaagcatttcagataagggatacccaacctgtaataatgggaaacaagcagtagaggctgttggttaatcttggcacaagtttaattacaggttttttttttttcctgtttcttaagtacagtcaaacataaacttactggaggaaacatttataaaaataaatatactttcatttg

SEQ ID NO: 1701 - protein, 638 aa, Homo sapiens
MQVSSLNEVKIYSLSCGKSLPEWLSDRKKRALQKKDVDVRRRIELIQDFEMPTVCTTIKVSKDGQYILATGTYKPRVRCYDTYQLSLKFERCLDSEVVTFEILSDDYSKIVFLHNDRYIEFHSQSGFYYKTRIPKFGRDFSYHYPSCDLYFVGASSEVYRLNLEQGRYLNPLQTDAAENNVCDINSVHGLFATGTIEGRVECWDPRTRNRVGLLDCALNSVTADSEINSLPTISALKFNGALTMAVGTTTGQGKIFTSLEPEHDLNDVCLYPNSGMLLTANETPKMGIYYIPVLGPAPRWCSFLDNLTEELEENPESTVYDDYKFVTKKDLENLGLTHLIGSPFLRAYMHGFFMDIRLYHKVKLMVNPFAYEEYRKDKIRQKIEETRAQRVQLKKLPKVNKELALKLIEEEEEKQKSTWKKKVKSLPNILTDDRFKVMFENPDFQVDEESEEFRLLNPLVSKISEKRKKKLRLLEQQELREKEEEEEPEGKPSDAESSESSDDEKAWVEEVRKQRRLLQQEEKVKRQERLKEDQQTVLKPQFYEIKAGEEFRSFKDSATKQKLMNKTLEDRLKIEAKNGTLSVSDTTVGSKQLTFTLKRSEQQKKQQEAEKLHRQERKRLRRSAGHLKSRHKRGRSFH

SEQ ID NO: 1702 - DNA, 5346 bp, Homo sapiens
ttttcaagagatagggtcttgctgtgttgcccaagctggagtacagtgttagtcacaggcatgatcccattactggtgagcatgggagttttgacttgctccatttctgacctgagccgcttcacacctccttaggtaacatggtggtccctggctcttgtggggtcaccatattgatgccaaactgaggacacccaacgctcgttgcgtgctacagccaagaactcctgggctcaagtgattctcctgcttcggcttcactagtagctaggacaataggcctgcaccaccaagccaagccagagtctgtgatctaaccattctattatgccacctttcccaaagatgtttacagtttttcttaactgtaaccagtgtagaaaattaaaaatttgtggaggatcttaaatttgaggacagagttaaggaatatatccctacgtacatggctaaatgtaaatatgtagcaatgcctaatagaggccaggcactgttctggtactctgggtaggggtggatggggtggatagggaatataaggacaaatgatatagggtccacgaagaactctcaacctaattctgatgcaatgtggtgttggtatttgagagtttccaaaatgttgtgggtaggagagcaaaacaataatatttgggttttagaaagtaaggcataaaataatttgttcattaaatcaaaggaagtaagaagatcacttgggaaagttataatccaaaaatagttaagtatttgagtttcagcaggaggaatgaaaacagattactttaaggaaatatttcataattagaaatatccaggtttagatactgaaagtgagggccagagataggaatgggttgaagatgacgccacagtcttcttttttttttttttttttttttgagacggagtctcactctgttgcccaggctggactgcagtggcacgatctcagctgacggcaacctctgcctcccgggttcaggcgattcccccacctcagccttcagagtagctgagattacaggcgcgcgccaccaggcccgactgatttttgtatttttagtagagacggggtttcaccatcttggctaggctggtcttgaactcctgacctcaggtgatccgcccgcctcggcctcccaaagtgttaggattacaggcgtgagccaccgcacccggcctacagtacttctaacgtaacatcgcagaaacactggaggagagaagagaatacacttccactcggaattcgcaccctggtcgccttcattcgctgggttcactcgctgaactgcctcgcccccgcccgggaggatgacatctcggcctgggcagagactcgaaagcctcctcctgccgctcgggatgctaacagcagggagagctgtgtctagtttttttttttttttttttttttttgagagggaatctcgctctgtcccccaggctggagtgcagcggcgcgatctcagctcactgcaacctccgcctcccaggttcaagcaattctcctgcctcaacctcccgtgtagctgggactacagatgccggccaccacgcaaggctaatttttttgtatttttagtagagacggggtttcaccatattggtcaggctggtctcgaactcccgacctcaggtgatccgcccgcctcagcctcccaaagtgctgggattacaggcgtgagccaccgcgcccggcttgtgtctagtcttgcccgtagcagcgtcgccgacagccacgccgggttgtcagagcctcactagtttttctcccggccgccgctcttcccggattcagccaccttccctcttccgggaacttgcccgcgtgttccggctccaggaagtgcgtcatcagtcggcgccagcggccgcacgccgcggagcaggggctcggaggtcccgggattacggtgctcgagcacgctggtgggaaaggacccgggacttgaacagtgttgtgcggcgccatgcaggtctccagcctcaatgaggtgaagatttacagcctcagctgcggcaagtcccttcctgagtggctttctgataggaagaagagagcgctacagaagaaagatgtagatgtccgtaggagaattgaacttattcaggactttgaaatgcctactgtgtgtaccactattaaggtgtcaaaagatggacagtacattttagcaactggaacatataaacctcgggttcgatgttatgacacctatcaattatccttgaagtttgaaaggtgtttagattcagaagttgtcacctttgaaattttgtctgatgactactcaaagattgtcttcttacataatgatagatacattgaatttcattcgcaatcaggtttttactacaaaaccagaataccaaagtttgggagagatttctcttaccactatccatcctgtgacttgtactttgttggtgcaagttctgaagtttataggttaaacttagaacaaggacgatacctgaatcctctacaaactgatgctgcggagaataatgtttgtgacataaattcagtgcatggcttgtttgccacaggaaccatagagggtagagtggagtgctgggacccaagaactcgaaacagagttggcctgttagactgcgccttaaacagtgtcacagcagattcagagataaacagtttaccaacaatctctgctttgaaatttaatggtgccttgaccatggcagttggaacaaccacagggcaggttttattatatgaccttcgatctgataagccattgctagttaaagatcaccagtatgggctgcccattaagtccgttcatttccaggattcattagatctgattttgtctgctgactctcgaattgtcaagatgtggaataagaactccggaaaaatatttacttccttggagccagagcatgaccttaatgatgtttgtctctaccccaactcaggcatgcttctgacggccaatgaaacccccaagatgggcatctattacattccagttttgggtcctgctcctcggtggtgttccttcttagacaacttgaccgaagaattagaagagaatccagaaagcacagtctatgatgattataaatttgtcaccaagaaagaccttgaaaatttagggctcacccacctcattggatctcctttcctccgggcatatatgcatgggtttttcatggatataagactctatcacaaggtgaaactgatggtaaatccatttgcttatgaagaatataggaaagataaaatacgacagaaaatagaagaaacacgtgcacagagagtccagttaaagaaattgccaaaagttaacaaagagctggcacttaaattaattgaggaagaagaggagaagcagaaatctacatggaaaaagaaagttaagagtcttcctaatattctcaccgatgatcgatttaaagttatgtttgagaaccctgacttccaagtagatgaagagagtgaagaatttaggcttctgaatccacttgtttcaaaaattagtgaaaaaaggaagaagaaactaagactcttagagcaacaagaacttcgtgaaaaagaagaggaggaagagccggaaggaaaaccaagtgatgcagaaagttcggagagttcagatgatgaaaaagcctgggttgaagaggtcaggaagcaacgcagactcctccagcaggaggaaaaagtgaagcggcaggaacgactcaaggaggaccagcagacagtcctaaagccccagttttatgagatcaaagcaggagaagaatttagaagcttcaaagattctgccacaaagcagaaactgatgaacaaaacccttgaagatcgtttgaaaattgaagcaaaaaatgggacattgagtgtatccgacaccaccgttggcagcaaacaattgacattcacgttaaagaggtctgaacagcagaagaagcaacaggaggctgagaaactgcatcgacaagaaaggaaaagactccgtcgttcggccggacacctgaagtcaagacacaaaagaggacggtcgtttcattgatttgggaagtggtcctacctgtgattagggaggggtacgtctcccccaaactgatcatcgttagggtgttaaacacagacgaggaaacacacgtttttaaagttcatgtacgttcttgtacacagaggtaaagatttgaaaacctgtgccttgtgggttggactttgaagctggccccgccgacggccaccgcacagccccaggggtgtgcttgcgagtcgttgctccctggaaacattgtcctttccccacggctttaatcatgaaaaccaggctggggtttttttaatattgtgaaatgtacaccatgaaatgaaaggtttatcctgtgccagaaaccaaggtttatcatgctctaggaacttttttcttacactgcctaccgccattcatgattaaaccatccagaaataccatccctgttttacctggtgtctgtgtattgcctgtgtttgtgtttataagtttatgctgataggtttgttcggcttgtttatgtattagtttgggatttgtttttaaataatttataccaagagagtataatctaatggtgcaggttgagagcatcccaaatccgaaaatctaaaactgtttgagcactgtatttatctgttcttgcactgctataaagaactacctgaaactgggtaatttataagtaaagaaaagaggtttaattgactcacagttctacaggtggtacaggaagcatggctgtggaggccctgggaagcttacaatcgtggcagaaggtgaagcggaagcaggtatgtcctgcgtggctagagccagaggaggagggcaaaggggcagatgctgcacactttcaaacaccagatctccaagaactcactaacacagaatagcaagggggaagtctgcccccatgtttcagtcacctccctccaggcccctcctccaacaccgaagattacaatttgacatgagatttgtgtggggacacagagcaaaaccatatcaagcactgacatgacattggaggaaaatgctcattagagcttttcaggttttggattttcagatttgggatacttgactagtaaatataatacagatattccaaaacacacaaaaaaaccaaagtctaaaagacttctggtcccaagcatttcagataagggatacccaacctgtaataatgggaaacaagcagtagaggctgttggttaatcttggcacaagtttaattacaggttttttttttttcctgtttcttaagtacagtcaaacataaacttactggaggaaacatttataaaaataaatatactttcatttg

SEQ ID NO: 1703 - protein, 688 aa, Homo sapiens
MQVSSLNEVKIYSLSCGKSLPEWLSDRKKRALQKKDVDVRRRIELIQDFEMPTVCTTIKVSKDGQYILATGTYKPRVRCYDTYQLSLKFERCLDSEVVTFEILSDDYSKIVFLHNDRYIEFHSQSGFYYKTRIPKFGRDFSYHYPSCDLYFVGASSEVYRLNLEQGRYLNPLQTDAAENNVCDINSVHGLFATGTIEGRVECWDPRTRNRVGLLDCALNSVTADSEINSLPTISALKFNGALTMAVGTTTGQVLLYDLRSDKPLLVKDHQYGLPIKSVHFQDSLDLILSADSRIVKMWNKNSGKIFTSLEPEHDLNDVCLYPNSGMLLTANETPKMGIYYIPVLGPAPRWCSFLDNLTEELEENPESTVYDDYKFVTKKDLENLGLTHLIGSPFLRAYMHGFFMDIRLYHKVKLMVNPFAYEEYRKDKIRQKIEETRAQRVQLKKLPKVNKELALKLIEEEEEKQKSTWKKKVKSLPNILTDDRFKVMFENPDFQVDEESEEFRLLNPLVSKISEKRKKKLRLLEQQELREKEEEEEPEGKPSDAESSESSDDEKAWVEEVRKQRRLLQQEEKVKRQERLKEDQQTVLKPQFYEIKAGEEFRSFKDSATKQKLMNKTLEDRLKIEAKNGTLSVSDTTVGSKQLTFTLKRSEQQKKQQEAEKLHRQERKRLRRSAGHLKSRHKRGRSFH

SEQ ID NO: 1704 - DNA, 83493 bp, Mus musculus
  misc_feature (1)...(83493): n = a, g ,c or t
aacaaatttgacaagatgtgattacaggtaacttattacatgctttggataaatgttaagtagtgaaggaaaacaggtacctctttctctaggactcatactgaagggaagaaacttcttcatggacagattcatctaagagcccttgggcacaggaagtgtctaaatgggattctgagaaggaatcctataatgcaaagggcaatcagggttaaataaaatcagctccaacctttatcttacagcctttgagaaatcaaagaatttcatgtccctacctctgtcaccaacttctgtggcttctgtcctgagcagggcaaatggactctgaattctgtcacagtgccttaatcactttgccatctcctgcccatggttagtcagtgctgaccatcatgtgacccagttcctgtctttggtttatttatgtcctcaaagcagttgaaaagtgttggtgtgtgtagaaaacaattaaagtttgggacaatggagagaaactcatataaaatataagtaatctaatactgaataggcattcttgttctaaaagtaatttgatttttttatgtgtgtttgttgtttgattctcaagacttagtttctcagtgtaaccttggctgttgtcctggaactcgctctgtagaccagactggccttgaactcacagagacctgcctgtctctccctccaagtgctgggaataaaggtgtgcgccaccatgactgatcatattaaaggttgttcttgctgacatcatcccatctaataaacacagaaggaagggtctgcatcaactttcaccatggcaactgcttcaggtgggaatcagcaatagttagcaaaagctatgtgttttatttatttatttatttatttatttatttatttatttatttattttgagacggggtttctctgtgtagccctggctgtcctggaactcactctgtagaccaggctggcccaaaactcagaaatctgcctgcctctgcctcccaagtgctggaattaaaggcatgcaccaccactgcctagcaagctatgtgtgaaagtataagaggtgggctatttataggttttaaaatacacaactacaaagggaagaacattcactttggtaaagctatcaaggctgtagtagataaagacagaagaactactttaggttaaagaaggacgaatgccatgaattatcctggatagggtcttagaacaacaacaacaacaaaaaaatcaaaaaacaaaaaacaaaaaatccaacccccccaaaaaaccctacaaaacaaaacaaaaactccaaccaacaaattaaccaaaaccaaaacaaaaaccaaaaaaccaaaaaaaaaaaaaaaaacaaaaaacaaaaaaaaaatcacaaaacctaaaccaaaccaaatcaaaaacactttaaaaaaatataaagaacattagagagaatgttctggtttgaatgcaatgtataaggtagataatcaacactattgtgtcagtatcaattcctgatttctgtcatcacgaggaaatgatggaagagtatgtctcagctcagagaaactactgtgtactgaagtcatttacagtggagaaggtaaaagggcaaacaaaccgcacccttaacttagtctcaaaagctttagaagaacatgggtagatgggaattctttataatattttgccattttcctttgagtctgaaacgactatgagataaagtagttccacctgtgcatgcggtgactgtgcacttctctgctcctctgcttgcccctgtcaccgtggccgagcgatggccctagagattgtcatactgctctccctgtctaaatgaccttgtgctgttgtttgagatgagccctctctcttgttaggctgctgcaatgagggcacccaggagcttccttcactgattcactcacatctaccgaaggtgtagaaagtagaatagtgcagagagaagaaagagactgctcatagggtgtgtgtgtgtgggggggggaagaactagcagggaaattaaggatggaccatacggggcatctggcaagaggagaacctcccgagcgtggcatgcaaagttaagaagcagaaaagaagatccaagggggaagaaagatgtttgggaatgggactcttcctggccattttccctttcaccacactggtcacttttgtgaatgtctggtcctaattccttggccagatagcagaactagtgtggttgtcagtacagaagagtagagaacatctgggctgatatagagacactcaaagggtatttagtggggtatatgagaatcaaaatgggtaacaatcacagtaacagcagcagctgatacaggattcccatcttgtccttcggactagtccacaaccttagtggctttcattttgttcaatctacacaatgtgatcagtgttcctatttcagagtagactgagacacaacgaggttaaggcaacggccatctgcccgctacagaaacaagcttcagactctaaactgaagcccaagggaatcccaaggaacccctttagacctagcacactccactcacgtttagctactcacttttatgaccaatcttagagatcatgtaactaagggctatgttattaatatccagcagctttgctgcacatgacctgtgctgtgtgagagtcaaaagggaaaacttggcttcagttttttattttagaatttggaggtcatttctcaaatcagtagaaactagtggtcccttctctgggcctgtgcaaagtggaagaccccttgatacctgctttttgatcttgcttatgccatcattttctggacatgtgtctcatgaagagcaaggatgtttgattatgcacgcgttgacccctgacttccttactttccctgacctctaacaaaccaccttcccccgtgcttcctgcccgtcctgcttctttttcccctgaatagtgctgagtcccacttgagggattcagtatgattgaggcttcctttctcatctccatccataactgttgtatcatttattttctcattgctaggacaaagtgcctgagaagtggaacgtagtttctttcggctcacagtccttaaagcccagcacggcaagggaggcatggcggcgggagtgtatggagcctggtcacgtgggatctgtgatcaggaatcagaaagacagatgctcctgttgctcattcaatctgggacccgaggtcatgggacagagccgctcacatgcaggatgggtcttccctcctccgttaagcctttcccggaaacatcctcacagataaacacagcagttcatctccagggtgcttctaaacccccgtcaaggttaagagtcacgacggacttctacatcagccctttctcttttgaaacactccttgcttcagtatagagccctgagggatgagcagaacaggcctgatccaataactgaagataactctttgatccttcttttgttctcatccttctcttccctctccagcaatctatgatggcaaaatcagagtcccagaaagcatggaccttctccgttgggttgtggatctgctctccggaacgtactttgggcagagcagggcaggagaggcctggcagagaggatgaagcaggttggcccgtgacccactggagcttcatgggaaggatgaaattgtcagtgtctgatggcaagagaaaactgtggctcagaagggcactgctcacctcccctggttagagttcccctgtagccagtgtgggggaggcacctggcgaggtgtagggcacagtgggtcccatagcccctgtcctcagccctcttcagagccttgcctctcacctgtgaggtgatggagaaggagatgggagatgggtcaaagcagggattcccttgggggcctctctgacttctttcttattttaggaggagtaggcagcaagttccagaatgtctggaacatgaaaaagagacttaataaatacactttcaaacccgagactcagctcctggccaggagacatgcaaacgttttaatatccttgttctgcatttacttaaatggaaacagcccgtggtatttttagctgctgtgtaatcaacgtaagaaggaaaggggaatgtatactttttttccttctcctagttagagtaagagaatgaattgctcaattctcaacagagtccaggaagggaggaaaatcccggagtcccattgattggctcctcctctgtcatagccttgatttaaacccagggagggaagcagagggagaagatattgagggacggatcggcaacgaagtctccagtaccaggaccagctcacaggaggcagggggattggaagtggtgcccagcagcctcccaggtaagagtgccagctccttgaggctttatcatcgattgggagggggacagtcagtgtggggaagattgtagactgacgtgcattgttgcaaatctaggcaaggcaatatagattaagttcaaactatctcccagggcctgtgaatcatgtccatagctggtatcagactctgccctccccaagccaggagacaccatccccttacctgccaagctcagtgcgtggggcaccagattctacgcggagcagtgcattttagatgatgtgttttctttaagtctatttgtgtttcttcttacacagacctcttctctccgtgtaatctcttatgtgctatagctcgttgttctcttaaaacagagctttcaatctggctgtgtttaggaagctatgcctaactttcccctctttgagatttttgtgtgaaccgatgaagatgatgcttgccgactccctcgaaggggctcattgagttgtctgtgttttaatcattacatgacagaggagactttctcttcccctactgcactatggttaccctcacagtgcctcaaagcgggcattttcaatcacttcaagagtgatgtgggacactggtttttgaagatctgagtttttatttgtaatttttgtagggtgggagagggctgggtgaagagggtagagggagagtcttcaccctctaaggaccagattagcttatataagcattgacagaatcataacttcaacatagaaatatcagattatccacatctgtgcaggtaagccatggctctgcccagttgcagactcagggtgatggtgacagtgtcaagagaagactcaagaggagggagagagtatcaatacccgggtcctttccctcagaaacaaaggagaaacagggcctgactttctctcatgctactctgaattcttttaatgtcttcaaagcaaagaaactgggcagatgatttccatcccatcttgtggcttctggctttcactctggtgccgtgctgtagggtagaccagctccttctgaggaaattatacccaggcccatggaaactctgccccttccagagccctggctcccataggctctggctgcagacatgaggtcatagtttaggttctgttggagcatttggaaccaccagtctgcaagctgatggtgttgtggtatcaggcctggctcctgatggtcagcagctcggcctggttccaccccagacgactcaggcagatgccagccagctgccatctaaatatgtgcatagcccatgtaggcagaacggcgcaaattcctggaaattagcattggctcttcagcttgatagaaggctggaactctaaagttgtttcagtgtgtggaaaaccacattaaactgaagggagaaattgtaacttctcattatgcatctctcctcattagcactcacctgaagcaagtccccatcgtggctgtggagaatagaaataattgtaggtcagcaaacactttatcattttgggggactcggttggtaaaagaaggttctcaaatttagatctcgtgtctattttatctccccattgtgggtgagcctggactatggaggctaacggaaaacctttctgtgaaaaattagttcattcccacagggataaatgatcatctttgcctattgttcacagacagcttttaaggctcttgacatagaaactggtatataaggagtgtttagaaaatggtagctactattatcatcattcactgggccctttgcaaaaggcagattaagatttagttgataaaaggaaatgagcctgtcgaaactgctgagaaagtagttgggccccagggctgagcctcattcattgtcctttctagtgggtaggctacttatatagtcagaggggttgttgcacaaggtgtaagaagtcttacaaacactccctaggaactcattcaatagacccagtggacttggagcacaggagcacacagcctggaatgtgctgtcatgtgctgttttatagagccacatcttcttcatcctcgacctgtctcacatcctgtacagagccacaactaagaatgtttgtatgcatttggctcaactggagggtgacctagaggaaacagtgctgtctcatatcctagattctcttgcaagctgaagaatgggaaatggggacattggttgtctgagatctcacatccaggatgggtcatgcctcagtaggttgtttagctccttgagaacttgattttctagaccaagtattctagtcacaagactcagaaccactcaggggccaggctgtagcacactggcaaactatgttcaagaagaataaaggaaggagtgaaggtggccagtgatatttgtgacatcagggcatccttagccacctactctttcttttttcttcattgtttaccgaggtctaccctattatttggggagagaatatcttcttagtgactctactggaaacccaccgtaatacagcttttctaagacccaaagcagtacactcatttgcttgtggttaaccattaggcaggatgaggtcatgaaggaacagagaaaggcctgaatttaagtacaaagctcgttgccagtggctagaagctggcaactgctctatttgaagtaagtagcattttttcctgactcagtgtgtgtctttctttagagaaaatgaggtgacacaaaggccatacagctctaatgagaagtccttgtgaactgagaaacattctctcctcctaaggcttggttgacatatgccctcatggatagaggtcttggtagtctctgctgtttcctgccttgtggtgggaagtggtgggaccttagctttctgtgaggaaaacacaattcatcttcccaggcatcagcttgctctggctgaaggccaggcaagtccaggcttccattcctgatttattaaggttttgttgaatacctggtataccttggctttcctttcctttcagagcctctctcttgaaggaaatatagcaggaaagaggatatttggtgtttttctttccacatctacagtttatattgcagaaagatgaagaatccagacacaaggagtggataagcctggtgtgtgatcccagctctgctgtttaactagttgaatgccctgaccaaattacctaacattttgagtacttatgacaaataatattgttgattgactgtcatcattttgaggattaattgaagctaatttttttacttgtttggcccagtacccacaatctaataatcacacacaaatctattgtcccttattatgtaactcacacactatttggccaaagctatgatgggtagctagaaaacaggagggacctgtgtcatcctagcctctaccatccatgagctgacaggcattctgggcagggaacagacttggatttctacacggtcgattttggctagaaattaacaccacaggagtggctgcagctatgaataagaaagagcatagaaccctgtgacgctagtgcatctcaggcagatccacaggaccatccatctaggttgcactgagcagtcaatccagagcaaagcctttctcatggtggccaccgtggcagcagttattacagatactgtctcagtcctcctcaccactcagtgctcctcctcctgcaatgaggcacagctttagtgagacagtagttcctggaggacccctggtttccatggtttcccgtgtataaatgccctttgcctcacgaattcccccagtatctctcccactttccatcaggagcttcgtcacaaagaatcatctttattcagaaatgtctcaactgttgtttgtcttggggaaccgtctgtggtgtgccatgcatattaatacagaggatgaagtcatgccttcctcatgctgctcagcaaggagaggctgtctcctgccacacgctggagccagagccagcagcttcccttcttactcacacttcacagtgctagatagattgaggatttcccctgctcgtcttctttctagcaatcactctgcccaggaaaatctgagctcagcgtgtgcaatctgagaggctgcgattagcaaggacatcttgttacaattcgggacgggcgacacagagggttccttcaagagcttctgggccttctcatattccaggcttcaaaagcaaacaatgtaagacagggttttggacagcgcttctgtggtttatggcaggagttccccattttttttcatttgttaggaaactcctttggggggaaaatctgcatcccatttagggctcaggagcagtgagcatgcggaccgtggcactgggtggtaggagtgagcaaagaagttgacttggttggctctattgttgcccagaggggatttgcggtagtacagaccatgccttgcaatacccacagtaggtgcttgagtgggtgcagcagatctcagaagcgaaggctctattgctcactgagttcaaatctgtggccttgcacttggtagtcacataaccagcagcaagttgttatggtcgccactccttagctcccaacttcagagtcaagcggacaatttgttttgttttatcactaggataaacttttgaacgaatctctattccgtatttctattccacacccaccttccaactccttttactggctcccccattccaccttctcactcacatccctggctttcctatttaatcactttcctgaactcaaatcctttttcttgacagaactcccatctactccggtggacagcctttcttattccctggatcaggttgctaggagctgcataatatgaatgtctgtgatgggtttgtgtgtgcttggatgtagtcctttctcttctctcaacttctatcactgttttggcgtttccaggttgctttctgaggtacagtattatacagggaaaaggatacccctctaccaaggccctatcattaaattgcctctggctagtcaggtacccatctctttgcctgccactcaattccattcattctggcctcaccgaccttccaaactttgaggagatgaatggatgcttgctacccactcattaatggaatcctggcagtgagagaggcctcctgactgtcctatttcatctggagagggtcccggtgcctaaaacatagaaagagtttggaagagaactagtttcactgctattaatagcacatgccttaaaggacagcagagtaaggactgagtagcacacatgggtcatatgaagacccctcttctgcaacataactaaatggatatgaaatccccatcacacaaaatagctaaggtgtaatgatatggaagtgcttcttgcccccattggatcaatacacactgcacacacgtgttgaactacttactacactgtgcaactgttactgttgatcaaagacatggttgatattcaggctcctataaacactagggactagggagatgaaaggctggcttaggcaagagaataggagccctttttgatactgtgaacagtgtgtggatgcttaggatctgttaagagagggtaagttccattcagccagccctcatggcattcttggttgttttccccttctggatctaggcctcctggagtatccctttatccaagaatgggtctctgggggatgctcgccttccccctgggatttctgcttgcttctgtgctcctggtggcttcggccccagccactccagagtctcccggctgcagcaacaaagagcaacaggtcactgttagccacacctacaagattgacgtgcccaagtctgctctggttcaagtagagaccgaccccacagtcactcagcgatgatgggacatcactcttggctcccggggaggatggagaggagcagaacattatcttcaggcacaacattcgtcttcagacaccgcagaagagctgtgacctggcagacagtgtccaggacctgctagcccggatgaaaaagctggaggaagagatggcagagctgaaggagcagtgcaataccaaccgctgctgccagggagctgctggtgaggctaccatctggtattcagtctacaaacacttagtgtgtgcttatgtgctgggtcctccactagcctcatgggtgctgtgagatcttggtgcatgtccctttttgcacttggcctttttttcaaggtacaagccatacccctcctctttattctctgatacagctctagaggcgtctggaagcctaggcagggagggttcagcaggctggtctcccagactaatgacaccagatgggaatgatcccagggctgttctgctgacaggccaaattgctattgaggagggaagggaagtgaaggtgtaaaaagaagagaaaggaagccgaatgcgatgttgaggaaattctcgaagtttcttcaactgtctaacaaggctggttttatcagctagcagagttctgcttactagagaaggtgtatattagagccctggtcaatagtaggtattcagaaaactgttaatgctatattagtaataaagtacaaaggacaactttttttttttcacctctaccgtttaagaacatggatgcccaggtgacaatgagtggtgcttttttgttgttttggttaagagtacccctaaacgccagatataaacctaggaaccagggacaacacaccactgtgaagaannnnnnnnnnnnnnnnnnnnacagcacaaggtcatttagacagggagagcagtatgacaatctttagggccatcgctcggccacggtgacaggggcaagcagaggagcagagaagtgcacagtcaccgcatgcacaggtggaactactttatctcatagtcgtttcagactcaaaggaaaatggcaaaatattataaagaattcccatctacccatgttcttttaaagcttttgagactaagttaagggtgcggtttgtttgcccttttaccttctccactgtaaatgacttcagtacacagtagtttctttgagctgagacatactcttccatcatttcctcgtgatgacagaaatcaggaattgatactgacacaatagtgttgattatctaccttatacattgcattcaaaccagaacattctctctaatgttctttatatttttttaaagtgtttttcctccctcccaccccccacccaaaccccagccagcagccccactttggaagtttccctaggaagggaagacgacattccaagaggcagaaggcactgcatcggctgacctgacctccagcttccccgagctgtgtaggagagccctggccaaatgccctggctcactcatcactgagcctaggctaccctgccatttctgtacacgcagttcacaaccagcagtgctgggtccagctccattctccaggataagatcaagtcccacctgcctctctccctggagcactggaacccaacaaccaatgaggaccatttaaagtccctttatagaaaaacaaaacaaaacaaatcaaaacaacaacagcaaacgctagtcatcactattcacaaggaaggaaccctcttttaggcaaacaaaagagaagctgagatttggctcaagtagaaaacattttcctcacaaagaccccataagatccagaaaatgtcagccacctctgactagtctccaaggaaggagacctccaggcctcacccatgtcttcttttcctggcagatctgagccgtcactgcagtggccacgggaccttcttccctgagacctgcagctgccactgtgaccagggctgggagggcgcagactgtgatcagcccacctgtcctggggcttgcaacggccacgggcgctgtgtggatgggcagtgcgtgtgtgacgcgccctatgtgggggtcgactgcgcctacgccgcctgtccccaggactgcagtgggcatggcgtgtgcgtgcagggtgtctgccagtgccacgaggacttcacagcagaggactgcagcgagcagcgctgtcctggcgactgtagtggcaatggtttctgtgacactggcgagtgttactgtgagatgggctttactggccccgactgttcccagggtgagagtcaaaatgcacgttgagggccacccttccttcctaatccgcggtctcagttgcattaactctattacaggttgccttacttggagagccaaacaatagagctggttggtggggagggggcccccaagtttcaccaagccctactggaggaactatacaattgatggctgctgggtgtggcttctagtagggttacccacagttcagtgggcaggctgcatacccaagggcaaacaggaagcactaactggattaaccaggaatatgcaaaaggaaagaaagggaggcacggagggtgggaaggggaaagggtagagggaggaagtacaagagctgagaaggaatgtgttgaggggaggaagtgaggggtagatatggttgagatacattgtatccctgtatgaaatttccaatgaattaaaaaaaaacataaaacaataaagtcctgggtctcctgccagagcttgccacatagaggtccctgggaggattctgaaaatatgcatttgtacagattcctcaggtggtcctggtggtgtcggtggtggtcctgattctgatagaatgcacatgttccatgttagggcaaccaaacagtaacttccaggggaacggtgtcaagaatggtgtgataggtaatctgcaccctgcaggtctaccaacacagccttaagtgaatagtaggtgctggagaatattcatttggccacccagtcttaccctctccaccctcacctcctgctcctcttctgcccacagtggtggctcctcagggcctgcagttgctcaagagcacggagaactctctgctggtgagttgggagccctccagtgaggtagactactacctgctcagctactaccccctggggaaggagcaagctacaaaacaggtccgggtacccaaggagcagcacacctatgacatcaccggcttgctgcctggaaccaagtacatagtcaccctgcgcaacgtgaagaaagacatttccagcagccctcagcatctacttgccaccacaggtgaggaacatcagatacaggctgtctgcagggacagtaactctctcctgttctagttctgatctattgctggttccttctggctggacccaaggtgaagggtctggaagacttaagtcacagagtccccaaaccttggatacagaatgggatggaggatgcaggagactggctagattggcttgcagggcatggtcaccactgcatcagcagacaacaccagactgataaaaagaatcaacatcacatgtatgtcactaatgcttcaggttcatgtctcagtgaacatccagggaattaaaagaatagggaggggtttatgacttgcatcaaataaggaaagctctgggaacaactctcgaagcagtgttcttctccaaacaaagaaagcaggggaggggtgggaacttctattcagaaacgcatacagcagattgccctgtcacacacatgtaatgacaagtacattcctgagcattgaaaaaaaaaaaaggctagggtcttgggagtccttagaaaccaggttaaaaatggttttccacgtaaacactaagcacttataatccgaatactgggaaggaggagccagtctagcctactcagtgcgctccaggccgatgtgatgtcctgtctcaaagaccaaggtagacagatcttgagaaagaatcctctgtgcacctgtgtaagtacaccacacacacacacacacacacacacacacacacacacacacacacacacacacacacaccatggacacgcacagcggctaacattaatgtgtaaagaacctggacttataatgcaaatgatgattcacagtgactggaccgttctgactggctccttgttagttgctttaaaggcctttagctgcaaatccaccacactgacaccaccaccatcacagccagcaccatcagctgtactggcacacgtctgtaatcctagcccttaggagaaagacacagcagcttgagattctgagagaccctgtcagtatagtaagtcattttaaaagacggctttcttcctctagctgtggggaggctacactatgtagcagtctagcagctaacactttagaaatccagtttttcatgaatattcttttttaagtttctattattactattacgattgctattattattattattaaatcttttttacagtctagtcattattgccctcagactgttcctcatcccattccccccactccccgcatcttcaagaggatgtccccacctccccatacccaccccatcagacctccccactctctgggccttaagtatctcagattaggtatgtgttctctcagtgaggccaaaccaggcagtcctctgctgtctatgggtcaggacctcatatcaactggtgtatgctgcctggttggtggctcagtgtctgagagatctcagggtcagggttagttgagactgctggtcttcctatggggtcaccctcctcctcagcttcttccagcttttccctaaatcaatcaaaggagtccacggcttctgtccactggttgggtgtatgcatctgtatctgactgttgggcctctcagagggcagccaagctaggcctctgtttgtaaacacaccatagcatcagtaacattgtcaggccttggagcctctccttgacctggatcccgatttgagcttgtcactggacctccttcccctcactcagtctcttctccattttagacagttcttttagacaggaacaattctgggtcagagtttttgactgtggcatggcaatcccattcctccacttgatgccctgtctttctactgggggtggactctacaatttccctctacccactgtagggtatttcgtctaagcagttttgctgtttgagagtttggatcagtctagttgtctgagtgactgattccctctattacccaagggccccccaggtaccaggtgctgttctaggagctgacaaatgcactgtcctaccctactctaaatccctggggaagatctggatgggtaggatgatggcctgtagtcatctttgtggaaacagaaggctgccttgcctgttttgttaggaatgtggtgaactatggtagatcagtatcgtaagggctttgagaggcgtggcaggattttgttagcaagcactaaaaatacccctgcagttgaacaagttgggttttgttgttcattttatcctgggaaaatacatcatgggggaactccaggggtgtctcggtgagaatggaaggaagggcttgttctaggatatggggtttaattagataacctggggaacagggatttgctttgattgggatatagccaaggagtgtgtgttggggggagaagtgggtaactgtgcttgggcatcttagggactcttctctagaaagagggctcactagaagcagcctaagcggtggttggaaagaagtaagcaccatgtctgttagtcagaagaggggacattttgtcatttctgtggaaaatagtcttgcttttgtctgtgtttagacacggtcatagaatggctttgtttttgtctcagccttgcatgtttgcaaagtgtccttggctaatgctaatgttctgtggaatgacttatgagcacgggagaatactaagcatagctatgagagccaggccaaacttctgaacaataggggctgcttttgtctgtagctacatctgctacagacaggatagtgctgaaactcccagggaagggctggaacatctgttcgaaagcctcagcaactcttcttagaggctttctctgagaatttgtaagatcttgctacaatgaagtttgtctttctgtctaaactgattcaagttcaaatctgtcttccttgcacttcagggagctttagacctactaatacgtattcccatcttgaacattctccttaattccttgctttaaaaaaagtgtgaatatttcccaattcttttaagccatgtcagacctcttctacaatcctgaagtcaccttcattaatttcctattggcttttcatttggagaattctttctttgaaagaagtctcaaagcagaggctgggcctagcaagtaggggctacagtgagaagaaaggctctgagaggttcttgtctatagaagagagaatcagagatacaacagagggaccttgggataactaggttcatactctgcctaatataaaagttcattgtcatacatccttgatgaatggtcagccacaatgggtggcaatgcctccaaggtaaagatgacaagatcttggaagggggcaaggctgggaatcttggaggttttctttttctttctttccttttttttttttcctgtctcatactgtaagagcaagttctatcagcctgggatacagctattgtaattctaagtgttcacaaaagctctcagttgaccccttccaaaagtttttcccatagagtgccatccatttgaattaaaattttagggttgttttccaattggcagggcaaatgttcagccctcttattagtcttattgtgaacaaaggaatatgatgagtgtcctttacaggacagagcaaaagggcagcatgaatacactggggaccttgtgaaagtattataatttgatagaaggttcaaagaagatgaaaagaaagaccaggttatacatcatctgctttgcaattttgttttgggttaatgtacagtgcacatgaggaccatgcgctctaatttgagagttagaagaaggatctagttgcattagcaatgttatatttttaaaagttgaaatatattgccccagattttatatgtatatattcctgtggctagtgcaaaggacagggactctgtagctaaagggagaacacccattaagagcagctgagccttgggctgggcactttggatactgccccaagaggagcaactctgatgtggtcagagtctgtatggaaggatgagatgcgtggtgcatagtggaatgagccatggagtctttctaggaagagtctgccttccgtggagatggccaagagcaacagccagctgttacctgggttagctccaagattcctgttaaagactgtgtctttagctgaagccagctctaagtgtgtcaagaaagaggactgacttagtggccaatgtactgtctcagacctttgtgacttctgcactcaaccattttctcttgtcttctctgatttctgctctagatcttgctgtggtgggcacagcctgggtaaatgaagagactgagacatccctcgatgtggagtgggagaaccctctgactgaggtggactattacaagcttcggtatggccccttaacagggcaggaggtgacagaggtcactgtgcccaagagccgtgatcccaagagcagatatgacatcactggtaagagtctacactgggagattccagatgttggctgcagaagcaaaggtggagggagacagtgtatcctgggtcttaggaaccacactggattccagactcctagatataagcctaccctggtggcctggtgtctctgccagcatttaagggctgcaatcccaggacacttcatttacaatgtatgtctcaagtgtccttccaagtcaacatattttttgaggtcctatgtatattttaagatgtatttgatggtgtatacatacttcttttggaggaatattgggatagactggggtgggaggaagatatatatatgtatatatatatatgtgtgtgtgtgtgtgtgtatatatgcatatatatgtatatatatgtatatatatgtgtgtgtgtgtgtgtgtgtgtgtgtgtgagagagagagagagagagagagaatgagagagaatgaggaagttgatttggtgagaatcatgacaagaagggttgcgttatccacaggatatggaatcctttcttagatgactgaactaagtctactaagaccaggaactcagaaaataggaatgcagggatagaccaagctttgtaatacttgaagtttctacacttttcaaggacttctttaagaacagtggtacatgtacacagccacgaataccacaggtcattagaagaagccatctaaacgaaagatcctcaggctcattagcctcatgttccatcctctgggtcctcactctgctgtctacctcctcagctctgttttgagagaagagctcgcagctctccatctttgtggagaggagagagtgtgtgggcttcatggatgcgactgtctgttttcattttactagtggagtctgaatagttgtgtcatggggaacaaccacttaagttgtttccacagggagataacttagcccagattcccttctttcttctattataagaaaaaagttttgagtgaaactggttgttaggagctggaaaacatttggactataaataaaattgtgaagtaagtactcagtagccaacaaaggacaggagctccaaggactcgatgccatctgttccccaccacggggagtctaccaatcccaaggcttgtcacctgccttgacttttagctttggggttagcataaatcttacccttcataagagaatccaggtagaagctgagtgggagtgggtcgggagcctgtcttcacactcatgttggctgctcttttggttttttaggtctgcagcctggaacggaatataaaatcacagttgtgcccatccgaggtgatctggagggaaagccgattctcctgaatggcaggacaggtatggagatctcatcttcacattttcagatttttcttgtctccgtgtgacagttctaggatttccatggagcggtgctatggctgcctggatgggtgtctatactgaggggcagaagaacagaagcaaatctctcccgtttcacttcttttcatgtcctggggaaaaacatacctgggatcttggagtcacggggagatgctatccctgatgcctttcttctgactttaattgcttcaatccctgaatcaaattaccgtctcaaggcacttaataggcatagagaacttcattccccgaggacagatgaactagactatttgtcacattgtatttgttcctaatatccacactcaagcagtctgttctgaagtgggagatgatgtttaagaccctcccacgggagtcatggtatagttagcatttgtctatcaagaataagatgttgtgcagcggtaattggtcaaatatcaaccagaatggaatttgaacacattgtaggtttaaatgcatattgaactgtgcacatcctgcatagagaatgatgctcctgcgtacacagattgagacctggaagcgactggtgattggagcctgcaaaacaggaatctttccattttgagtttttcttaaagagtggcttcattctttccgttaagtcttagaagtagctaggtatggtgatatagtaatgacgctgaatggttcgagttagagagctgggcaattacaatgaagagctgtaatttaatttatgatccagacaagatggactgggtagtttgcctaaatggttgatgagacatttgagtgagtcagaaaatggcaagtacttcccttgcttctgaaagctttctctctggcttgattgagaggttatagatcaactgaaaggttgctacgtgccaggcagcaaatttcctcagcatttttcatgagttttgccatttagttctcacagtcagtctatggatgagctactactattatttctaggtcacatgcatacaaaaactaagacttgaaaacgtaaaggtcaagatcacccagccaggaaatggcaaagctgggttcgaaagaaggctgctcacctctaagccttggtgcttagtgacaggagcaaattgctgcttagttgatccttctgttgagagatgaatatgctttctcctcttacacaatcaacacaacacacaaccgttggccattggtgtgcatgagcgcgcgtgcgcgcgcgtgtgtgtgtatgtgtgtgtgtgtgtgtgtgtattattcctcttatatccagcaattctccatcagacaccaactgggtatcacacaagttaactcacttctaatagtacctattaaacataccagtagatttggactgaagggtcagaatttaaaaatgggttcaggaggaaactggaggactgccttattagaatttgaaacaacatcagtagggaggccagttgtggacctcaacagccttgggaggaggtgggtagagaagaggaagagagtctttttgagctctggttgaagagaaccggcatattcaacagtgcacgctagcaggaagctgcatggtcgaaggggagaggtgcttcagggaacaatgagaaagctcagaatgtcagatgttggttggtattaaaaaataatttaaagaagagagaatgagtgaacgaacaaaataggaaaagtttttctttttttagtctgaactcaaaaagcaggcagagatttagcagagcctgattctctcaccaccttatcatgtgtttggctgaatcaggtttcctatgggtaaactggtcaggagattgatggggtccagtggattaacgtttaggggagaaacaatagcatgctctcatctttccagtccataagaaagtcaatctccacctagaacaaccagggaaagaggaacctcagcttccattcttttgaccagaagagtgtgttatgctttcccttaataggattcagggaagccccgagacctccatcttttcatgtgttattttaaaccccaaggaggttaattgtgaagcttcccttcctaatgttacccaggggaaacaggatgtagagcccaaagcatgatcaggagggaagatccaccgtcattggcctacaccacgactaatcctggtaacacaacttctacttcttgacgaaagccttttatagtcacattaaatgtcacagcctctgagttcttacaacaattaattgcgtgtgccattgaattggtagttaacctttcaagtatattatcccaactagactattagcatctgagaagtgtttttattgtcaattatatcctaacatcaggatgagacacttcactggatctcaaataaatctagggtatgtgcactactaaaataaaaaagaaaaagatcctatcgtttctgaggtcagggaagaccatgagttaatttaggagattaaaaatttgttttctccaaattttttgtttcttgcaagctgagaaagagcaccaggatttaagagcagtgtatgcgtacgcaggaagggaatgtagttcagttattttccacttaacaagtcaaccaatggaacttgttaaaacaaaactcttaaaactgaagggtctccaaataaaagggtttattgagctgttacagctgctagacaggaacaaaataaaacaaaacaaaaccctgaccaggttcttggacaagttcctttgactattagcaacaaagctaaatagtagttgaaactatgtgagtgggacgcagagagccaagaatacatttataaaatcctgggaaggaacacgtatgtgcataacactgagtctacactgacaatagataagagagatcagattatcacggacatcgggagatggaattccagcccataagaatgtagcttgaggaattctcccaagaaacctctgctccttccgctacaatcaggaccttgaattatgctggaggaaaaaaaaatgaggacaaaacaatgaagcaaactaggctttatttaggaaagtagagaacatagtgaggggacaggtataggcttctcaagagacagagactaacaaggatttaacactatctacaaaggattttgaggtcagactggtcaaagaacatgatcccgtatctaaatataaaaatctaaaattaaaacattgaattaaaatattctagtatacttattttttaattcaagaattgttttactcgtcaatgagattataaggtgttttatgagtgtactcttcaggtttatgaatgagctaaggggttgctgagaagagaagtttaagtcaaaaaggtcaaaggaattattgctgtaccttatatcaaaacaaaatcatgaccttttgactgtaaactctgttcacaacctttttgagacttttttttttcagaaaaaagaaaatcctcaggtttacagacaatgaacaatcggatatggttgaactcaaagggcactaacattttgtccttaaacattaagcatggttcattacttgttttaactctccagtttcatatatctctcaggaaaagtaacattgtctccctgcaggcaatctttacaatgtgggtatatgaagactgcatctttccattctcctatccccatacgtttttctgtctccctgtcctgctttgggattattcagagttgagaaaaccttggagtaagagagcaatgtttgtcgctctgaattattcagttttaatacttctggaagctttcaagtaggcagggcgtggtgattctggtcagtgactatatttaagacaaggtttctatgtagcattcaaaaccagggagagagatcttacctttagtttcacccacagttaataacagattcacttcctttaccatcttcctcccccctcctttccagtcatccctttatcaagctaatatcatgagaatgacaaggctgatagaggtcagtgaggaccgccagtgtgcggcaggcgggaagttgtagctgaaggaggcctctgggagcaggttggagagatcctgttttgtagatgaggctacagctgtagttcatctatgatttggcccaccaccgcagctactggaagattttgttgcatggaaaaacgacttaatgttccccacatcccctcctggcagacagggagggtttggtcttgcagggctggcttcatgcaactgtgtaagtgtgtggggtccatcggtggggtctacttctcattctcagatgccagcatctgactgctgtctttgttccaccctgtgaatgatcagggatcacagctctgtgaggatccccctttctagtctatgctggtaaagagttgagagaaagggggtggggaagaaggcgtcactgagttctaggctggttctgtctggcaggacttctgtggtttaacttctagatctagagtggctgtagacatagaactagattaaattttctttcctggtgttcataaccaagatctatctatctatctatctatctatctatctatctatctatctatctatctatctatcttctatctatctatctatctatctatctatctatctatctatcttctttctatctatctatctatctatctatctatctatctatctatttatattttaaacgctagtgttctttaactcaggtctagaagctcaccccacagaaaacccaatgttgggaagattagtttttcgtgttttctttcttttttttttttttttttgagacagggtttctctgggtagccctggctgtcttggaactcactctgtagaccaggctggcctcgaactcagaaatccgcctgcctctgcctcccgagtgctgagattaaaggtgtgcgccaccaccgcccggctggggagattagtattacagtgaaagaagtgctttattcagtgggagcttttacttgaaaatcacccaggaggctaaagagttgaggagttacagacataggaccagaccaatgagggagagacaccccctccaatgaagaagagaaaggctactgtctcttctctgaacaagcagagctctttcagaaagtcagatgcctcgtcttttcattgtctcttgttttcagcggcatctgatagggtttttttctttctataaaccctgaaggagaaagagagacttagcaatgtctaggtcaagttaatcctgcattataactttaggcaaagcatttctcaaatgatcaatatctctacatgcagagcagagtagaatctgacccaaaggttaaagcaaaaaagaggacagacacagaatgaaggcagagatagcaaaactttccatcccacatcaatcacccatcagacacgtgcacagaaaagcagagtcggtgttctcaggaaagagttcctcaagtgcttgaaaagcaacctaggctactgttagcattgcaacaatgcactgaatgctttctacagcaaagcaaatggaaaactacagtgtctttagctagattatgtaacttatgaggttagtgtttttttttttaaatgaagggcaaatgattctagaggatttgcttagggttttccttggcaactactccatctcttcagtgttctgaggctgctgagggaacacaagctccaaggctggccaggttggatctctcagtgcacatagacagttctgacgctaccaaaccactggcctgtgctgtgacaagatgttgcaggctaagtactgacaggggcacgttgtgggagtgagaggtactgctaggatgctggactttgtaggtgtgggtgggtcactttggagaggatgagagtcagggctttcaagagctggattgcactcctctctttgtgtctttaatcttctcttctcctttcatcaccattgctgagactgagctatggcctgggggtgggagtggggctgtgtcagcatccctgcctcacaagcacagagacattggggtaaggggtcagagagagaatcctctctgttgtatacatgtcttcttctgaacgatctcttagagcctcctgatgttggcattagggatcttcaggcttctgcatccagacaccccctctctcattccatggaactccctttgccagtgagatgtgtctagcacccctacagcccaagctgttttctttctctttagaattctccccaagttcttatcaactactcctatgttatttcaggttgcagtagcctttcagagcatagtttattccatctacaattgttaatgtttatcccacatagattgaagagatgccagtcacattggattggatccacctaaatgactccattttaacttatgatctctgaaaagacctcagatgcaagtagacaaagattgttagtgttgtgacagttgctagtatttattactgccgatcttacagaagttatctaacctgtctgggcctagcgtatacatactattctaagaggggaagactattagttttcctaacttgtgaggcacctggtgaatgccttgtgtttttaccatgggatttggtaactaatgtatgaaaagcaccatgatccttggtgtgtgcttggtaaatggcagttgacttactaaatgaaatatgaactgcctctggtaatggaacacatttcatcttctcttgcaaataaaacactgcccttatgtttgataaaggtgcactgtagctaaggttgaaaaatgggactatgtgaaattgtaacttctctctgaaaaatccttggctgagagaccaagaatagattgaggggcggggggggggggagggagagaggaggagaatttagctgctttagaccaagaagttgttttgtggatttttcagttaaaaagatgtagatccatatacagaggacattctagggtcatgtcttagcggtgttctgtttgacatctttatcagtggccttaacgaatgtgtattgatggcttgcttataaaattctccagtgtcaggaagatagacagaaaagtgagcatatttagacaaaagattaaaatataaatggaactttaagagggcaaaactaatgagtataaatgttggccaaggacattattaaacatgcatagattggagatggtgggatttaacatggaagtccttattctttgatgcatatcagaatcacttaaaagttttgtttatgtgtttactaaattattatatatttttagataaggctttactcactggatcagtctggtgttgaacttcatgtatagccccggtttatctagaactcatgtttctcctgcttcagacttctaagtgcaggaatgatgggcttgtcttaccacaaccaaggaggtgtgtgttatgtggtgattcttgtttctaatcccagcgttcagaaagctgaggtacaaggactgtgagttcaagccaggctgggctatatagtaagattcgctttttaaagaactctcataactccccaagcataaaacaaaaccaaccaaacaaccaaacaaccacaaccaaccaaccaaccaaccaaccaaaagtccctgaaagaagctaagcgatgctagggcttactctgcatttcttgaagtggaatctctgctggctgtacttggcagggacccagtgttggcagaaattgaggacacctagatagggggactcctgaggccacaggtacagggtgtgtcttcaggatacagttggaaaattgttttgaacaccaatgacctcaaaaaagactgctgactgtcttatttatttataattgccgaatgccatcctatattccctgtcacatacattgttgtgggggtaaataagttaaattttcggcacttttatttcaggaaagaaagacggaaacattgtatagatagatgataaatgcctggtcaagaaactttaatttgataggagtagatagatgaggccagttttgatttcaggggaattgagaaaagaagggataactgttcttgaagagttgctgagtggtctcctgaaagggagttagaggcagcccacctatacgtatagtagacatgttatgggagttatatttcacagaaactactatgtcagtgatagcattgattactttctggtttatcagctgcacctaatagagtttcttctaatgtagtcagtaacctgaaactagaacagatttgtttttttaatctaccagggacctattctcagtttaagattaaggcagaggctagatatttgcctgtcatggttgaaagagagactcctttgtattgttgagagaccattgatctagaccttaaagtgactgtggattttaccaggcaactggttcctctaatttttatttcttatgtatgaagaaattgatggaccaaccaatgtggtcacaaatcaggtgacagaagacacagcatctgtttcctgggatccagtgagggctgacatagacaagtatgtggtgcgctatatcgcccccgatggggagaccaaggagaaggcagtaccaaaggaccagagcagcaccgttctcacaggcctgaagccaggagaggcctacaaagtctttgtgtgggctgagaggggcaaccaaggcagcaagaaagcagacaccaaggccctcacaggtaacgggagaatgggagttaagtaggtttcctcagggtaaggaggaagttgcttttgaaggtgaagatcattaccatttggcatcagctcttttattggtggggttggagaatatttacaaaagcaattttaaaagagcgttattttaaaaaatttttaatacaatatattttgattttatttgatgatattgttttcccttcccatctactctcagataccaccttgcctcgctgctcacccaacttcatgtttttctcttgctccaaaaagcccccaaataaaacaaaacaaaacctcaaaaatcaaaacaaactaaaaatataaacaaagcgctttctctctctctctgtctctctgtctctctgtctctctgtctctctctctctgtctctctgtctctctgtctctctctctctgtctctctctctctctctctctctctctctctctctctctcacacacacacacacacacactcacactcacacacacacacacagagtttgtttgtattggtttctattcctgtgcatgggggctgcttggcatatatatgcttgttctaccctgtgaccctccatggggaaatagatttcctatttcccagcaggtgtgaattgaagttagctcttcccttaggggtgggactttgcatctattttccacgatcagtgctgagatttttttatcctaaagcaaatttcaaatgtcacatttatgattttttcttttctcttttcttttcttttcttttcttttcttttctttcctttcctttcctttcctttcctttcctttcctttcctttccttcccttcccttcccgttccttccctttcttttcttttcttccttcctttcttttattttcttccttcctttcttttttttcttttttctttttttttacattttaacttcacatggagctataagactatttaataggaatagtcatatttatttgggatgaaattccatatacatctgtcttggagtagagtaaaatgttgtaatttttactttttaatgacaactgaagactttggaccaactataaatttgaatgtttatctcagattacagtggtgatagaagtagtttgcatgcagccaggagctctctttcagacaaatggtttgcattggcatcaacatttgccaaatgcacggatacttcccgtgaacctttagaaacataagatctccaactgcatctgcttggtctgctcagctcaggccttcagatgttctgagacgtactgagacagagcatggccagtctttgtgctcacacactctgttggtcatctctgaattcacaacagtctaattggtatcctcctgctcttccaaagcacttagtaggaactcagagggaaaggatccgctgattgtgtttgtacagtcactgaatacagagaacttcagagaggcatgcataggaattaggaatatggtttcagatccttgaccatttaaaatttaactccagggttgccatttattagctgagtggtggtgggtcaattactggtttataaaatggctcaggaatgtctgtgatacaggaatatggggagggttacataagtgtcttagttagggttactattgctgtgatgaaacaccatgatcaaaatcaagttggagaggaaaaggtttattcaatttacacttccacatcacagctcatcatcaaaggaagtcagaacaggaactcaagcagggcaggaacgtggaggcaggagctgacagagtggccatagagaagtgctgcttcctggcttgttcctcacggtttgctcagcctgcttgttttttaatagaatccagaatcaccagcccagggtggcaccacccacaatgagctgggccctttcccatcaatagctaattaagaaatgccctacagccttgcctacagctcagtcttttgtaggcattcccttaattgatgctccctcctctcagatgactttagcttatgccaagttgacaggaaactgtctaggtcagtgagtgaattcacttaaagcaatgggtgcacatcacttttgttgctgtgataaaacactgaccaaaaccaatgtgaggaggaaagcatctgagaagggacccctgaagagagcctggaaggacaggtgggagctaacggggaagtcacctgtgcaaaggcctcagggatgaggttgagcagttggtaatctcaagtgtcctttatggtaggcaggtctgtgacgtggtaaaatagcaaggatggggcctggacattaaagtgtcccaggagttagaccctttattgttccacgatgacaacagtgatatagccccatctctgtgcttcttaaggtcagttgtctcatgggaccacttgtcactgctaggtctggcccgtggtggtgtgcagggtgaaatgctcttttatttatttatttatctatttatttatttattattttaaaaatattttattaggtattttcctcatttacatttctaatgctatcccagaagtcccccataccctccccctttttttcccctacccacccactcccactttttggccctgtcgttcccctgtactgagggatataaagtttgcaagtccaatgggcctctctttccattgatggccgactaggccatcttttgatacatatgcagctagagtcaagagttccggggttctggttagttcataatgttgttccacctatagggttgcagatccctttagctccttgggtactttctctagctcctccattgggggccctgtgatccatccaatagctgcctgtgagcatccacttctgtgtttgctaggccccggcatagtctcacaagagacagctatatctaggtcctttcagcaaaaatcttgttagtgtatgtaatggtgtcagcatttggaagctgattatgggatggatccccagatatggcagtctctagatggtccatcctttcatcacagctccaaactttgtctctataactccttccatgggtgttttcgtcccaattctaagaaggggcaaagtgtccacactttggtcttcattcttcttgagtttcatgtgtttcacaaattgtatcttatatcttgggtatcctaagtttttgggctaatatccacttatcagtgagaacatatcatttgagttcttttgtgattggattacttcactcaggatgatgccctccactataacaacaggaagtgctctttctttctgggaatatgcttcaggaactggctcctagagcggggttatgaaggcatcatgtttaggaatgcctttttgtttgtaccatattgtttggagttttgactctaatccttacattttgagggagaagggatatcccatcccttatatgccattcttaatagcaagccttataagcacgtaccacgcagacgttcatctatgaggaaggatggctctttccttctttgtagaggggcagagacagaaacttaagttatgcagtttgttctaagtgaggaaccaagaaaaccagagcctagtttctatcccatttcatcacacagatactcgggcagattctcctaggctccttctcatgaacccacacctcagtaccaccagtttacagctcaccccattccctggacacacacataacgttctctgtagaaagcactgacagctcctacttcaagaacatttttcatcccaagagcagggaatagcagagaagattattgaaatatacttatttcaggtgcaaggggtcagagaactgcaagagggtgctatgtaatttatgataaattacatacaaatggcaaaagaaaagtttatggaattgatctatttattggcactgtctgaattcttcctttcagtcatactagcagtttattcttagaatacctgacttgtctacttagagcttagctctctcaatcctcagcatatagctgactgtggagttatttgacatcactattttggctgtgcctttggccttttaggaactagagagtaataaagcttaccctcctcctttgtatctcccttaaagaaattgacagtccagaaaacctggtgactgaccgggtgacagagaacagcctctctgtctcgtgggacccagtggaggctgacatcgacaggtatgtggtaagctacacttccgtggatggagagacgaagcaggttccagtgaagaaggaccagaggagcaccgtcctcaccggcctgagtcccggtgtggagtacaaagtttacgtgtgggcagagaaaggcgatcgggagagcaagaaggccaacaccaaggctcccacaggtaagcagagagagatgcaccattggaatgaagtgtgaacatacagatttgagtgtgcatggtaccacaggttgggacctgagaccagagactacaaggatgcatgagaggtagctcagccagtggcatgcttgcggcacaatctaagtccaatccttagcacaagctggatgtgggggtgcacacttgtgactctagctctggggaggtgcacaggtgggatccctggggctcactggccagccagcctaacctagtcagctagcctcaggactcggtgagaggagtaagattgcacaggagtgacgcttttagcagactcggtggttgtgcgtagagggtctggttttggaaatacttgtgacaataccttcagagtgctcaccggagaggcagcccttgataaaatgataaattagttaccctgacagtgtgacaggtgtttaattggctgtcttgatatgccatatgttactatgaagagaatattccttctacattttagggagccaaaagtcaagaaaacatgttaagtgtatagctagcctgatattgagatagagacccagaaactgcttcctcgcttgactcacagcagaggcttggcttggtaaaccattgccttgtgctgaatgttctggaagataaaaagcaagataagggggtgtgtggcttccattgttatagcttagacttctcaaacatgttcctttcagacatcgacagccccaaaaacttggtaactgaccaggtgacagagaacactctcagtgtctcctgggaccctgttcaggccaacattgacaggtatatggtgagctacacctctgccgatggagagacaagagaggtcccagtgcctaaggagaagagcagtaccgtcctgactggcctgaggccaggtgtggagtacaaggtccatgtgtgggcccagaaggggacccaggagagcagaaaggccaacaccaaggcccccacaggtaatgggacacgcattgcgctgtgcatgagatggcgaggttggcttctccctctctgacatgattttgttgattagaggcaatgatgctccctccggaattgtatacctccttctcttacaatgcatgtcttacactgtaagtctctaaaccgtggtctttacagactgatgcttcctgcttacagcctcccctgcttgcctcttcttctgcctgtgaagatgatttgccattagacctaagtgtttcactctggcaggaagcaaatatgaagggagtgcaagcaactgtcaggcggagagagccagccttgtaaggttgtgatccaccaacaacttctttttaaaaaatccgcgcttgtttagacccttcccatgaagtttgttcctgtttctgcccttcggatgagtgctgtaggcagaaataattgcagtgttttgttctctacaaacaagccagcgactagtcccccctgtgttgacttttttagtaatgaaaatgtccatttccatgtatgggtccatccttcatttgcagttagccatttgcatgctaactgcttgctgtgggaagcggtactgctcagcttttcttctgttttcctccttgaactttaggtcccttcctttccgctggctaactctcattgttttccatcctgacccgttaccactccttcctcctaatctcctagcgctcttcatttagtggttggttgattcaaggttggttagctgaggacccccaaactgccctgatggtgtcacctcacccttctagctagtcctccaggacagctcctgacacgatccccaagcactttctcaactgatgttcagttcatgggaactgcatcccccttgctctttgtgagagcatcctgccattttctcactgatgaagaattttagccacatgtcaaacacctgctgatgtgttccccgtgctttagaaagggtgtctcaacctcggcgctgctgacatttgagcaggacaatcctttgttgcggggctctttcttttgtgttggagaatgcatagcacaccctgtatctccctttcctctgccaagttgtagctgtcagaatgtcttaggcattgctaatcaacctggctgaaatcttttgctctatagcaaacacagtaagccctaccagggatcgaggtgaaacagattaaagttcagacctcacccaaggtacacaaagtctttttatgtaattccagtttctgagtcctaacatactggcctctccaacttccttaataactggacatgtttataaccatgttagccaaggaccttaaaactattgatccctccttacctgtgggcttccaggtgggaagttagataccatttttcttgaggtcatagcctaaagcaacatatgaaatagaacctttgaacaaatcaccttaggaaaatggcttttttaatgaacttctttaaaaaaaagaaaatattactagtttattgataaaatatattttcaattactttatgttatgtagtatggaggacaaaaatcccttggatttataaagtgtcaatgaattgatctcatcatagtaatgatagttgaaggtttgcacatctacctggtgctaagaacagtcctagcatgtgattaactcataggatctaacactatgatgtaacacctttacaagatataaatcaatatcttccatattccatttttgtttcctcttcagaagaaattgaggcacaagggctgggatgccttttaccaagttttgaatctcagaatgaatcttctgtggtcctgaagctgtaaacattgtttttatcttacttggcaaagctaaccacacacacacacacacacacacacacacacacacacacacacacacacacacatacacacacacacacacacacacacacacacacacacacacacacacacataaacattttctactttacaaatgcagaacagagtaaagcaacttgcccaagtattaaaactaagttaataattgatgaaaatagatggacatgttgaatattggtacctcaaagtctataaaagagtctctctctaatcttagagatgaggaagcagagcttagagacaggcagctgaattgccagaagctggctatcaactggatgatggcagagctgagacgaagttcttggtctgctgactggaacccaagggatttcctgccctcagcaatgcttctgaaggtagaacatatagaacataaagatcctttggactttacagtttcttggatgcagtgttcattccagtgtcctgtgctgtccccctgaggctctgaggtcagctgtggagacaaggtctctgtccatgaagcactgaagatacatatccaatatggagaaaccttaagaactggaaactctcccagcccaggcccaatggtctcagtttctggagcctgttactagtgtctactgatcatctctttctcttttagatattgatggccccaaaaacctggtgactgaccaggtgaccgagaccactcttagtgtctcctgggacccagtggaggctgacattgataggtacatggttcgctacacgtctcctgatggagagaccaaggaggtgcctgtgtcaaaggataagagcagcacagtcctgaggggcctgaggccaggtgtggagtacaaggtggatgtatgggcccagaagggggcccaggacagccggaaggccaacaccaaggcccccacaggtatgaacattgtagccggaggatgtgacatatttcatggtaagctttaggaaggatacttgctattccttctttgatcctggaagaaataaatgatcatagaagaccagagtggtacacttttgtcataatacccacaccctccccacatgacatttacatttaatctagaaatatggactcatgctttggtctttcaaaggttagtgattgttcacatcaacatattgttcttcgaattgtatatttccatcactgtcaaacactgaagtatttcatcttgaagataaagtgacatcaagatgcctatgctttagggtctaggagctaagtgctttggggaaatggtgcctgctgggctttcctcgatacaggagaatttattgttctgttcgtgagtagattctcttgagtactgtgtgtgcgttccactttcacggtcctagagttgcagtacgtacctagcatacacaacaacagttggtaagttcaaggctttcctgcttctgtttcatttgcaaagaatagtgttataaagatatgtgtgtatatatataatgcagtccttaaagtatacagcttagaagttagtgttacatattgacagtgctgtctaacaattagcactctttagaacattgtcctcacaataaagaacatgacatacatttccagtcattgccctttctcttcccctccccatcagtagcaacagctgtctttcctagatttctctgttctgcacagttgtaatacatggagtcacacagcatgtgctgctttctcagaacagagttttccagttcatctgtgttataacatatatggacatttacatttttttaacattaatatttccttggatatacacatttgtttactattttgtctcggtggctatttgttttgtttccacattttaaccatcatgaataataacactggggcattcatttctcttaggtagatgtattagaaatggattgttaaccctatgtgtttaattttgagttcttaccacagtaatctccaaagaggctgtgccctttcacacacccacaagcaaagatcagggcaaatgtcttcatgtgcgtggtcctgaggagaatttgttattggcagagcaggagttcatgttctcattcctagctaagagtcctcaacctagtggagtatatgatttctataattcacataaaataaagatcatagtgtctgactcatgaaatactcatgaaatattgtggcatattactgtatatgtttctaaaatccactcttacaggtgaggagactgaggtttagttagaagttgaagtctccaaggctgctgggctgggaatattttcactatcttgggctacttccttgaggatctgagagtctagttgtggagataagatctctgtccatgaatcaacatcagtataggaaatgggagaaacagtaagaacaagaataaatgctcagtccagccttaaagatgtctactgtgtgtgcatgtgtatgtatatgtatgttagaccagtggttctcaactttcctatgcggcaaccctttaatatagttcctcatgtggtgatccccacaaccataaaattatttttggtgctatttttaacttaattttgctactgttatgaatcataatgtaaatatctgtgtttcccggtgttcttagacaactcctgtgaaaggttgttcaatccccaaatggattgtgatccataggttaagaatctcctgtttaggcagagtcttgttgggcagcctatactgatctcaaattcatgatctcatgatcccaggcctcagccttctgagtactgcgactacagacgtgacacaccacactcagtttactagtggatactgatcaagcttttcttttagatattgacagccctaaaaacctggtgactgagcaggtgacagagagcactgccaccgtgtcctgggacccagtagaggctgacatcgacaggtatgtggtgcgctacacttctgtcgatggcgagaccagggaatttctcgttgggaaggaccaaacaagcaccgtcctgacaggcatgagaccaggtgtggagtatcaggtcgacgtgtgggcccagaaggggacacaggaaagcaggaagaccagcaccaaagccccaacaggtaatggacattgtcccctgagaaggtagcagttatcatcccacacctatgagaagtcatgtttgggtttctttcgctgctatgatgatcagtgatttcgagagaatcgggatggcagatcatttctgtacagcttgcaccatctctaagtgctggacacatgtctcttaataaggacctcatgttcagccttccacttcagcctcatagaagttggtgataagctgtggatataactcagtagtgaatgcttgcataacatgaacaagtccctgggtttgatctgctggaaaataaaagggccaccagtggcaggtgacttctgcccagtgttctttcaaccatgtttcccctttgtgttcagtctcaaaatatttctcttcatgaagagatggaaaggagatggatgttagggcctgtgaagtaagtactttaggaaaacggctttcactgcgatcactttggagcaaggagaggatgttaatttttagtgataaatcctctcccgagtgctgtgtttcattctggggatcacaccattgctatttcatataacatttggtaatcatcaggcctctcatctgtgcttacacattttgtcagaacaatcgtattagctgatatttacatattgaaatgcaccttttaatatgtatgacttgattaatttagactactcacagagttctgtaactactactacagtctattctcaccactgtaaagaactaagctcagactcacggccattgccaatcagtctccaacctcactacttccaatgctactaacaatggctgcctgtctctatagttctatgttctggacattgtttataatggatttatcatctatatagcctctggtgagatctcattcattttggtttctttgtattgtaacacatatcagtatgtaaattagtatttcacagtacatgtgagcacatttgattttcagtttgctccttgtttgatatttggattattttaacttttaaaagtctaagatgaatatgttataaggacatttgtatgtatatatatatatatatatatatatatatatatatatatatatatatattttgtgtgtgagatgctagggttcaaacctaggatctggtccatgctaggccaaataaattattttgtcagactaagatttcatgttgtcagtagacatctgactatattcccatccttctgtgcacaagattttttttgcatatatatgccatcacttttcttggttatataactaagagtagaattataggatcatttggaaattctaattttaatttattaggcaaaagttgagctaagattctaaatgctgcctagcaacaaataaggactattttgtctgtgcacttagtcctcagagatgttggctacattggtagatcaggcctgagttagtgtcttcatttcaagtctgagaatccctcagttccatgaagtgagtgatttctgtaagtcacatagctgatacctcgtgggtttcatttctcaagtactcatgcagtactgaggtatcttataatttattaacccaggcccacaagtacaaataagaaaagtagtcaggctattacccagttacccaggctgatggcagagctggggtaaagttcttggtctgctgactggaacccaagggcctttctgccccttagctctgcctcttaaggtagaacacagtcttcttggatgcagtgttcattccagtgtcctgtgctgtccccctgaggctctgaggtcagctgtggagacaaggtccatgaagcactgaagatgcatatccaatatggagaaaccttaagaactggaaactctcccagcccaggcccaatggtctcagtttctggagactgttactagtgtctattgatcatctctttctcttttagatattgatggccccaaaaacctggtgactgaccaggtgaccgagaccactcttagtgtctcctgggacccagtggaggctgacattgataggtacatggttcgctacacgtctcctgatggagagaccaaggaggtgcctgtgtcaaaggataagagcagcacagtcctgaggggcctgaggccaggtgtggagtacaaggtggatgtatgggcccagaagggggcccaggacagccggaaggccaacaccaaggcccccacaggtatgagcatagtagcctgagcatgtgacgtatttcatggtaaaccttaggaaggatacttgctattctttctctgctcctggaagagaccaatgatcatagaagaccagagtaatacacttttgtcataacacccacaccatccctccatgctatttaacacgttggttcaaagtaaggaccccatattctcctcttcttttgtctcttgaaggttaatggtgattgacacatccacccacggtttatcaagatgtgtatttcctttgtggtcagtttcaaaaggatcctcttgaaaagaaagaacatatgctaggatctgtgagccatatactttattgaaataaatgacttttgctgtgctctctttggaacagagaaggacattgctttcttagaaaagaagccctcttgagtactatgttttcttctctgaagatcctgtgactaattatatctaagaacagctgataattctaaagcttttccatctgtgtttcctcttcatcaagaatagcctccccaagatggcttttcacactccaattcaccctcttgaagagtccagttcagggcatatagtattttcttgacatagtctcagaattgcacaatgactgccactgtttcagtgacatcaccagcaagagggacctcctcctgtccatcaccagcagcttcccagccccattcctgcagccataagtaacaagtgctgtctgtctctgtggaggtctctgcttaaataaaaaagtgtatttttgttaattcttgagaatttcataatgcacacaatgcattgtgatcattccccactctccccatctcctcccaagataggttgttgtcccttctttcttctttataacccactaagtccactttatactacccatatactcaggggtgtggggccatccgtggttgacctaccacatccccaaaggccctttttcagaacctatcgattgtcaatagcctctcagctggggggccgggtcccattcatgctgcacggagttcaagattacagtggtctggtcatgtccacagacatgtttttgtgcaggtcctctccaactctgactcttacagtcttactgtctcttcttcgtcaatggtccccaagctagagtgtgtgggatatagatgtcacatttgtgggtgagccctccacagacatttgttctctgaactgtgaccagttgtcagtttctgcatcagcttctgcccactccacaaagaaacctctctgacttgttatagatatatgtcacatttgatgtggcctttagtgattgacttttttcatgaaacattattcctcaggatctgtctcattgtagcatgaatccattctaaattttatccttagtgagtgtttcattgtatggccgtatgacaatttgtttctccacttgtcacttgtgaaattgtgcattgtgtcatagcatttgtccttgagtatgtttccaggacataaatgcctaggagtaaaatttctggatcactctcttattctgtcctttatttttcactatattatatatgccagtatatttccatagtgtttaccccactttacacacccattaggaggaaataagggctttcttcctttcctcagaggaatttgctgagttgatagcacccctgttttacaataaaaaaatctccaaaccagtgaaatctttgacttcaccaagacatatagagagctggtgaaggtagaatctgattcatgaagtatacacggaatattggcctatcttataacctagtctaagggtcacatttatgcaaaaggaaactggctgtggtggccatcccattgtcctattctttctctctgtggaaccaagagtctctgtctatgagatcacataatgaaagcagacatatggggtagaaaactctaagatcaggaaactcagcccaagcacaatgacttcagtctttgtgtctactttagttagtgtttattgaccagtgcttatcctttcagatattgatagtcccaaaaacctggcgatcgaccaggtgacagagaccactctcagtgtctcctgggacccggtacaggctgacattgacaggtatgtggtgcgctacacctctgctgatggggaatccaaagaattcctgattgggaaggaacagaggagcacagtcctgacaggcctgaggccaggtgtggagtacaaggttgaagtgtgggcccagaaaggagcccgggagagcaagaaagccaacaccgaaggtcacacaggtaatgaacagcatgggttagcagtatgatggctgccaggccaagcttaggggaagtcaagctttaatttcttcctgtgatacagatgggtattgatggattttggaagagcagctttatttcttgcacgatcaacttcacataccattccttactccctgaaactggtttccttatgtgctagaccagtgcttttccaccttcctagtgctgtgaccctttaataaagttcctcatgttgcaggggtctccaaccataaaattatttttgttgatacttcatagatataattttgctactgttatgaattataatataaatatttgttattttccaatggtcctaggtgacccttatgaaagaattaaacctgcaggttgagaaccactgggctatgttctccaaacagtctccaaactgctcagctgaatagttcctgatttctcttccaagtgcttggatttcttgccagagatattattttcatgagtaagaccggaaaatgaaaaaaaaatcaaaatttactttaagattctagattttacatctgctgtcacaagtaaaggcttgcttctctacatccaaatcatattttaattataaaacaaatttgtcacggtaaatgataagccccgtgagagagctctattgtcatgctaatggacacaaacttgtttgcaaaagccaaggtctccaacttgaatctctgtatgttgcctgtcgcatgccttgcatatagagcaaaagcttgatagctttactaaatgaatgagaaattagtgttttttttgaacttttaatagaaatcatactttcggttgtctgattctggttgtttggggtctccatgtgggtagggaagcattcctgggaagagatgtgaatgtatgaagacaagtaagaaacaaacagcaaatgaacaaacccccaccaaaatagagtgtctgagatagaaaacaacagaaaatgaaaactcaccactcaccatagccagcagtgtctgcactctgagcctcttaatggtatatatcgatttcttgttgttgctgccatcattatcaccaacatcatcaccaccatcatcaccatcatcatttttgtgcatgtgtgtgcaagtgtgtgtgtgtgtttacacataggcacacataggacatggtacatgtgtggagatcagaggataattttctagagttagttctctcgtacagtgtcagggatgacagtcaggttgccacatttgtgcaagcatctctactgactgagccatcttgctgacccaatagcacatactgactaagacttttaaacttgtagacattgacagccccaaaaacctggtgaccaatcaggtgaccgaaaatacagccaccatctcctgggacccggtgcaggctgatattgacagatacatggtgcgctacacatctgctgatggagagaccagggagattccagtgaggaaggagaagagcagcactgtcctcacaggcctgagaccgggtgtggagtacacggtccaagtgtgggctcagaagggggcccgggagagcaagaaggccaaaaccaaggcccccacaggtaatggatgctgttcattgggactgtcaagcttgtcatggaagagcaaacattctttccttttcttacactgatgtaaaataggaggtgaggaatgaacatgctgggttaataatagaggttcatctattactgctgtgtgatggcattggtgatttggggtctgtgacctcaaagactggactgttttaggaggacaccttaacccattttctccgacatatatagcacctgtcagagacaaggtaaatttgtaaacaacaaacgtttattttattttattttattttattttattttattttagatttatagttgtagaaaagaatcccagtgtctgggttgtcttgcatcatcacacacatggacaaataaacatgtaagacaaagagaaggcagaacttaagcctagatctgagctgatgtgcacagtcctgtgggggtatcagtcctttagtgagggctctgctctcaaaagttctacttcttaaaaccttactgagggttttgatgtaaaataggaaggaaggaaggaagggagagggagagagagagagagagagagagagagagagagagagagagagagagagagagagagagagagagaaagagagaaaggaaggaacccaaacctttcattcactttcaaagagagcaaagtagagcaacagatcctctgctgagtagtcgccctaatgccttgaaacttttcccgtagcacatgcccttaattgttaatgttccccagctactgaagatttcaggaactaatgcgaaattaatataaaagttctgggttaaagaactgtgttgaggcaagctgttcaacgtagacttcacctaatagaaagcatgtggtataaagttataaatgtcaccctgggaagcaggagagccctgtgtctagtatgaagctaacttttcatcgccatcttttaagggcatgacggacctagggatggagtgacgaacaacttagtatgatctgtgctctcctgacagccagtgggagagacaggcaatagatgaaaaggaaaatatgtaactgtaaattatggcacgccctccaaaggacatgaagatggtggaggttgagagaagagtgggatggaagatgtagtgatttgataggttgagatggtcatagggtgcgcattgtcagatgcaccaaagagctgactattaacaatgcagtttatacagaaaaatagagtgtaagtgctcagggctgacatggtagctccctctgtgcaggagacccaggctccttatctgttgtatatctgtcacccttaaggaattgtattcatttacttggtaaacatacatttgcattccagctcatgaaaagagtccttggaaagggcagggaatattccatgcatcagttctcagaaatctttctaagatccaagatacagtgcctagcctcagtgataggcagctaaagaaagaggtcctcagacagatggccacatgctcagcttcaactctgctatgctgtcctgttcagttgtcctccaaaacaaaaacaaaacaaaacaaaacaaaacaacctccaaaaccaactactttaattagacaaatataagtaaataaattatttggtcagactaaccacatttcatgttgtcagtagacatctgactaatggctcagtgatgtgttggacaatctggaggagaagctggccatttctggtataagtaatttcaggactgtaatctgtaatgagatgattgagaaatgggaagaggtaggtatcattggagcaagaggtgagagagcaattgtcctgagatgaggtgggaaggaagaagtcatcaggttacacagaagcacatggtgcctgaaggagaaactgtgccttagctatagattagaaacacagcatagtatttatctaaaactatttttcaggacacagtgagaataagttgaagagatgacaagggaataaatagatcagtaaaggagttactattaaaatctggttagtgacagtggaggggtgacaacaatagggatacagagaaggagatggctgacaacatattttggagctacaagcaatagtacttgattgataagacatggaataaggaaaataaagaatcaagtatgactgtctgcttcgagcaatatggaagattgcagtactatttctttttctgagaaaggaggctgaggggggtgtttatctcttcagggaggcaatgaagacttaaatgtttaaatttgaaatgcctgtgagattcttttgcttaatatatggtttgcttttattagtcccacaaatacatactggggatgagccaggcattgtagaagatctgcagtagtatgtacaaaccaggggcttagaattgtcctcttgttccacaagggtagccagtaaatatttcagagcacagatatgatagtatcatatttgtgacaaatggggaggtagggaagaagagagagagggagggaaggaagaagggagaaagggtgaaagagaacgagaaggagggagagagaaaaagaggaggaggaagaaaagagagaagagggaaaagagagacagtgagaagcagaggaagaggaagagggagggagggagaaagggagggagggagagagagagagagagagagagagagagagagagagagagagagagagagagagagagagagagagagaatatgagagaaattacaatccagtgtttagatgttccagcatatgcaggttacaatcaaagggctgaagaggtgaggcagaggtgccaatgtattaagcacattggaagagtatgaaactatggaagccaagagttgagagttttctgagaatgaatggatctgttttgtacaatgtcactcaaagattgagtaaattaaaacaaacaaacaataaaacacaaagactgagtgaactgaggatgtccatgtccagtagagagttgtccatctagaacgttttagagatctatactcgcagatttggtggtatggtgcagggccacagtggagctgagcttgaatgtgaggtgagtgatgttgaaatactcagatccttctctggtttatagagaaatgacatgaaatgtgaaaagaaggggggtccttgatactgattttctgagactgatagtggaggggaaatactaatgatcaagagatagagagaggaaaagaagaaagccctggaggtggaggaagacttaaacattcagagcatagaggtctttgtttgaaaacaagaaatagggatgagggtcttcattgctcttcttttataagccaaggggctggaggatatttggtgaagcacagtaggtacaatggagagcatacaggagattgttccaatgacagtttcagtggcttagctagttctgattttcactgtgatgctgatgaaaatgggaaggacagaacatttccagaggaataaatgtagagaagacatggttttctgttggttgtaacatccggtgtctatttccctggaaaatggactctgggggattctcattcccatacccttccttccttccttccttccttccttccttccttccttccttccttccttcnnnnnnnnnnnnnnnnnnnnnnnnntctttctttctttcctttctttctttctttctttctttctttctttctttctttctttctttctttctctctttctctgaaatagtaccttaccatgtagccctgactgtccttactgtctgtgctcctctggcttcagaactgttaggattgcaggaatgggccactatatcttcttgtttctgtatttaccactgttaccgataagattgtaccagtcataattagactattattagctctcttgaatggaggaaaactcttgtggaagggggtggtgagatgcttttccatggttctaaactcagccttttctaaatcttaaaaaaagaaattgacagccccaagaacttggtgaccaaccgagtgacagaaaatacagccaccatctcctgggacccagtgcgagccaacattgacaggtacatggttcgctacacctctgcggatggagagactaaggagattccagtgtcaaaggatcagagtagcaccatcctgacaggcctgaaaccaggcatggaatataccattcatgtgtgggcccagaagggggcccgggagagcaagaaggctgataccaaggccctaacaggtactatgacacttcactctttccaagagtgagtcttcctctataaaaagggtgaggaggggaggaggagggatggttgctttatctgaagatgttttccaaagtggttctccattaaccttgcttgtgtgtgttgtatgtgtttacatgttcatgtgcatgtatgcatatgttcatgggcatagaggtcagaggttgacatgaggtgtctttctcagttgctatccatattatttttttttgagatggtctctctttgatttggctaggctgtttggtcagtaaagctcaatggatcttgtctgtctctgcctcctctgccctggtattacagatatatgttactgcccatggctttttatgtagggagtaaggatctgaacttagattctcacgcatgcatgtgaagcacttgacccactgagacttctcttcaggctcatagttctctttctgaggtagtgctttgacaggttaggtaggactgagggcacatagtatatggttgtataagttattcttccccagcctattggctgaggccagatgccaggatctctgtacctgatttgtgttagaaactggttgggtctcagctcctgctgggagaagaaagaaacaggaactgactgggcctccatgggacccaaagtctgtggtcccttcaggcattttgaacaaggtctatttatcttctctatgaccagtagaggtgccctaaatttcttgatggtttttattagttaaaattaagctctccacacacattaaaatctactaagaataaaaaaaatcacattggaaatatttgtaaaagaaaaattaaaaaccaaaccccaaacgcctttttccctagttccagactccctagaatctggctccctagaggcaatggatggccattgtcctccccttcatctcccccactactcttcctcttccatactcatctcctctctcccatttatcttctcattcctttactttccccagtttaaaacctttaaattatatttctctctccttcctttctccccctccctccccttcacttccccccttcactctccctctgtgtatgaatgtttgcatatgagcatgccacagcacacatgtggaggtcagagaacagcgttcaggagttggttctctccttccttcacgcaggttctgggattgaactcaggttgttaggctcagtggcaatcactcacgggcaagatgttgctagccccactttttccaaaatttaaagacagcaacgaagctatcaccttcctgctccatagaaacaggaaattaaccaagtcagacatcccaagtccacagccaggggacagtggttaatcaaagaggaggcagaaactgcctcaaaatatgttaataactatgtgctgatttgattctgaaggaaattcagtctctctatgtgatggatagcgaatgatccatgccagatgttaggctttacaaaatcaaaccaagctgatattacagagactcaaaatttgtcaaaacaacctaattcaaaacaacagctgtctgatttctattaaaatactacaattcagttctcagctgaaatgctactgggtagaaaatagcctggagatgtagttttgggaagttctaaattagaattgccttttatgattttttttccttcaaaatggaaatttccattcatatcttatttgcttaaaaatatgaacattctgaccagctttggtgggaattagtatttttgctgagctttcgttttctatggtacatgctcacatactcatgcacaccctttggtgtgtgctcacacccccatgcaagccctctggtgtgtgcttacatacccatgcacaccctctggtgtgtgctcacatacccatgcatactctctggtgtgtgctcacacacccatgcacacttccagtgtgtgctcatacacccatgcacaccctctggtgtgtgctcacacacccatgcacacttccagtgtatgctcacacacccatgcacaccctctggtgtgtgctcacacacccatgcacacttccagtgtatgctcacacacccatgcacaccctctggtgtgtgctcacacccccatgcatgccctctggtgtgtgctcatactcccatgcacacttccagtgtgtgctcacacccacatgcacatttccagtgtgtgctcacactcccatacacaccctctggtacatgctcacacacccatccatgccctctggtgtatactcacacacttgtgcacactctctggcacattctcatttttgtgcatgcccttgaatctttgctcacacatctgtgcatgccctctggctttgtctgtacccatcttagccaccattccttccccctctgtttctgagaaagagtctcacaggaaggtctctggcatcaagctctctgaaatcctcctggctctgcctcttgaatgctgatctggcaggtatgaatgaccacatccactttctttttaaatatctaaatatttaacatatatatttctgtactgggtatatattgaaggcttagatgcttaagaaataaacctttgtattttataccaacttaaatttatcccaagtccccttacacattatggtccctaatctcagtatctaagtctttggggctctctcagtactaggcataagaagatgccagtttttcattgcctctccagacaggtaggtgcctttgagtgacccctgtgttctctgtgcagggccctttgtaatctgtggctctcacctttccaagtcactcaggaagctccaccaccatagagaacctgtgtgccaaattagacttctcagatctgctgctcttggaatctactggggaaacgaggcccagagttccttcctctagagactacacaatgccgtattcctagaccctcttgaactctacaggtccatacttctagaggcaaaggctagggagactctgagcaagaacagacttgccagcagctggagggctggatgagaaatgggacaactcgcaggaggaaaagaaaaacagatgactgaaacttgtgcatggcttaggaacaataattacgtggcttctcatttacagaaattgaccctcccagaaatctccgtccgttcggggtaacacattctggtggggttttgacctggttgcccccatctgctcaaattgatggctacattttgacctaccagttcccaaatggcaccgtgaaggtatgaggacttcttgtacttctcttggtgccttctcttcccagcctccccgtagaacaacttgttggcttgacctgctgatctgtcacctgctaagggcagttatttgtgaacgccatgctctcggtgtaaggactaacctctgtgtctgctcctagatgactactacatatttgctggctgtgtgtattctccattttatcattctttttttttcaactgcttatttttaatttctagcggctcaaactcaaggtcttgtgcatactaggcaagctctgtagcgccaagctccacccgtcagctctgctgtttcctacttcctcctgctcttcctgcacttcctcctgctcttcctccagcaccagctcctcctgtatctcctgcttctcctgcacctcttcctgctgcacttccttctgtgcagctcctcctcttgctcctccccttctctatcttctcctccccacttcccctcgccctccctctccttcttctcctcctcctctgtaaattgttgggcctgcttaatatatttagattccaggaggactgagactttttttttaatctaaggcatttagattaatgcttcgcatgtgaatattttcttttgttttatttttggcatcagcgaggcttgaactcagggccctgtacatgtcaggcaagtgttctgcccctgaactatgtctgtccctagccctttttagtatttttattctgtgacaaggtctcactaaattactgagctgacttcaagcttgcactcttcttgctacagtctggaaagcagctcaggtcggagtctgtgcagccacacaccaggccaccaataaaaatccactgaataaacagttgaccattattttaagggctagctttccttgggaatctctgaagtccagcaaacctggccagtagaaaatcattgttctctctgtagcaataaacaaacagataaaaaaaataagaaagaaaaaaagagaacactttgacttactcattattacaatgactgcatctgactgtccgacttggagagtttagtccaatgtttacagagtaaggcatattcagggtttcttgaaataccaactacttcagtgtctcacagttatgatggccagtttgccttctttctaaaaccatgttcttaatcaaacattgccagcctactgctgatagcagttactatcgtcagtgcctctccaggtatctgaaggaccaagtccctaggcaacctggctggggttcctgtgttggccatgcacagcctcagttcccagctagcccttctagcagggtggactgtccatggcatggccctccaggaaagtgactgacactggctgggattctgggctgccactgagcacatggagcagttttaacgtcatgtgtgtaaatgctgctgacgcccaggctgctgggcagagaaactgagttgctcactgcctgttatcgcttttgtttataggaggtggagctcccaagaggccagcagagatttgaattgcaagacctggaacagggtgtcacctatcctgtttccttggttgccttcaaaggtaatcagcggagccggactgtgtctaccaccctttctacaggtaacgtggaatctagtcttttaagtgacaatacacagagaggcattggagcggccagggaggagtgtggaattatagagaagtaaaaatggggttctggtttgcaaaccagttcaccccacagtgatgtgactaaagagggaagtggggaagctaggagagtagacctaagacactgagggacatgagcctaacttaaaggtgcatttgcagagtttgatggaagcagagtgatggccagctggccttccttctaaaaacatgtcccatgatcaatatgtgagctaagaattggaaaaagcaagtagtgtaggaggcgatgaaataatctccagaccaagcgaattgtctcgtaatggggaaagctgcaatgtctcttctttcccgtctaacaacaccgtccttctgcttggtctcagtggatgctcgctttccacacccctcagactgcagtcaagttcagcagaacaccaacgctgccagtgggctctacaccatctacctcaatggtgatgccagccggcccatgcaggtgtactgcgacatggacactgacggaggcggctggattgtgagtcttaacggtgctcagagaagctccatggaacatcttgtttcttagcccagggagatggtcgtagctgctccatggaggtcctatttcatctctgcctatggagggaaggaaatttgatggcttgcaactgtgtggagggagatcttgtcccattgcaagggcttaacactcactggtcacagaatgggcttggttaaaccagagtgaaagactatgagtttagcatcatcaaaaaatgcctaaatgtttctaaattctaccctcttcaaagcactttgaaaaccatgaccttcacatgatatgttagtgtgagaggattatcattcttgttttgcaaagggggaagctgaagcttacagagaaaacatctttggttgagtcagtcacacatgtcagtgacattgctgaagccaccattccaggagacacatatgccagatcctcgatcttcctgatggcttgtgtcaggtcacacaagatggaaatacacagcttctttgggggagtcagtcctttgaactagggcctctggtttttggtttacaccttggctctgtaggacagaaacaaaatattagggctttgatttgaagagtaaggccagagctagggaagcttaggctgtgtctaagctgtcccagtctgccaggaagttttactgtcttgggccactgtctccttgcattctgagagttctttcattggttgctgattcggttctatgatgaatctttgaagcttgccggtggattattcgatctttctctcttacttggcttctccctgtgtctgagccaattgagggtcttactttctctaatgaaaggtagctttcacctgctgtacattggaaccaattgtgggagagagaaagcatggcctcatagtgtcgagctatgttcatttacacgttttcttagtgctctgggaagccagctagtttttgagcagccacaggtaaaatgaaatcatctgacgagtggcaatgaagagcacagagcacacagtgtctgcccagtgacaaggaatagtgggatgtctgtttcatccaacaattggttggatggcagaaagtcttgatttataaaataacacaacagattgtaacatgggaggtctcccacctaagcagccctgtatgtctgtgcctgctgcttttcatcatcaccattgtacctgagctcagttccctcaggcccacagcccaatttaccacagttgtgcttgtaattgaccactggcaggatgtctgtactgtttagtgtggtctttttttgaaagcaaagcttgtacaaggaagggaccatttatcctagggcaggagagagaaagagagagagagagagacagagagagacagagagagacagagagagacagagagagacagagagagacagagacagagagagacagagagagacagagacagagacagagagagagagacagagagggagagggagagggagagacagagagaggtagaaagagagagagagagcagagagagaaaaagagacacacagagagaagtagagagatacagagatacagagagagacacacagagagaggtagaaagacagagagagatggggggagagatagagagaaggagaggtggtggtggtggtggtttgtctccctgcacaacccatgatatagtgtacaaatatttattgagtacctactgtgtgtcagacatagattaaccatccaggaatgaacaaatgagacgaatctctgacttgctttctatatacccatacaaatgagccttccttaaacactgtcagttatagaactgctgaatccactcagtactgtaaccagtatcagtctcatcccccatccccccacctcacgttgtttgctccggcctccagtaggtaatatatgtagactgtacagaggtctcctctaagtcaggagctccacaagataaatagagttctaaaaacttctactatatatttcacttactgtttggggtttttatttggttcaagagtcttctaactcttaaagataacccaggcttctatcaagcttttaaaatccttttatgaaagttgttctctggtccaggctgcaggcacctaatttgatgaacaggcagaaggactttgcccccaaggctacccagacagccaggaggaggctggaaagaacatcagggaacacttaaaagtttcaaatctttccatcttggaagtgtaagggctgcaccaggggctctttccacagacagttcaatgcaagtttgatcttcccctcctgatttagtgagaaatttctccaggatgatgacagtgctggattacagaccccaacatagatttatttccttttactatttttttgagtagttcattgtagagcatttaaattttcaaaattgattaaaagcctcaatcaaagccatctgatcaagatgtataaattatctgtgtgggtcagtatacttaaatatgacataatacaatggaaatcaacaattattaagatataataacagtttattgttatctgtttgtgccagactctgctatggtatgacttgctgacctcactgaagacttcctctaagctctgaggtcatggggcctagttatactttgacctgacagttcagagaagcttgggctgtgggcatagctcagttggtagagtgcttgcctagcatactcagagtactgagattgttctctggtagcactgaaaactggacatgatgctacacaactgtaatgttagcacatgggaggcaggggcacagggattagaagttcaagatggtcttggctatgtatgagttcaaaaccagcctgcacatactgggacattttaaaaatactaagcaaaacaataaaaccccaagccccaagcatgctcactggagatagagaaattggtattgcacatttcattagaaaggcaggctcagaatcaatcccagccttggttgaggatgctacttaacacagtggatagacacataaggaatgtcagcaccatgtccagcctagattgcactgtgagacaagaagaaatccgagagcaggttgacacaggctccttactaggaaacaaatctcccaagtgttcagaaatactactgaggaaatatacctgggagagctagactctcaaactttttgaccaacactggactgtgtatcatccttgtttgagccaccaaatggttgtgtggatatggctaatttttttggactttgccatctgtaaaacggcattgttattttttccctcagaatcaacattcattagatgtccggtaaatggttgctatgttaagcccaaaataaatgaagaatgaaggaaaaaaaaaaaaaaaccaatcaaccaaacaggaaaaaaaaaaaccccacccaatccaagcgggggaagctttaacaagtgggcaacagggagaaaaggagctaagaacagcgtgctaattagctgtgttacttctgtgtgcaatgacttgctgtgattttccctaaattcttcttgtcagtttatgcccatttatgggacatttttggaggacatgtactgttccatctagccttcccagaaacgctgtggcagacttctcttccccactcctctctgctttacagtgagctggctgggatcagaaaccaaaatgactgactcactatcccccaggccagaaagtgtctgtggctgacttggagcctggaacattctcttcccatgggtgtctttattcagcacctcctcagccacagagctgtagtggtgctgaagggagttaatggtgagcggccacgtgtgacctcagctcgtgtcacttttagagaaaaatgtaaagattccacaaccattaggtttccttcaccaaattcaaggctatagataatagaatttcatgttggggcttcttcctttagatcagtacaggggaaacagaggtagacatacaattctagactttggtaagtggttgctaatcatcactgaatgggccacaacgacttttagtttggtctcaagttcaagtggaataatagcattactcttttcaatactgtgtgcaggtgtgtttgggtttaggaaagttttcgagtttatctcatataaaggagtctgatttactcggagggggaagtggccttcttttcccgtgtagagatctttttgtatacaaagcagctcatctttctgaaacagaaccaaatctctagttctcatttttcttactcctcagcccagcccagcctgcttcctgcctctctctaacccagcccttgctgaagtaattggggattttcatgtcactaaatcccagggagttttgatcttacatcccttcacccctcatcagtactggggactactgaccattatttctcggttattacacaatgttttttagtttcctttctctgtccctagctgcttcttctctccctaacgagatcatccatgcctatgagcgtattggaggtctccaaggattgatttcagttctgactttctttgtatatggcagcatctttccttcctccgacccccgtactttcactttgaatctcactggatccttgtgttcattaggacagcatgattccacagcaatgacagtgacaagccactctcccactcccatgctctaagaatacacatgcagtcacttctgagtgctgtctcagcagttcaggttgcttccgatttgtggctaggccatcgcagcatgtagcatttaccaatgtgcatgccagtggaagacagtgtggagaaccccacctactctggtcctcctgcctttagcttaggaatagtcacatgctttttacttacctgcaaaagaagttgaaaaccgtcctgtgttcttgggacaaggagagtgaagtaggacttggtgaactcctgccatttctcccagatacacttccaacttagagagcaagcctaggtctctcatcagcaccctacccccctctgctggttacatgaaaccctgcttcaccaggaaacctcagaaagaattaatactggaccagggatgttaatcagtggtagagtacttgcttggcatgcacaagaccctacatttgattcccagcacagctaaaaggaaaggagaacaaacaaactcccaacttacacagtgtccccaagtgagcttgatacagttgcaaaagatgtccctctcagaatcttccttctgcaagaacagctgagtaaataattatccagtgctgcaatcaaaacttctatagaacaggacagccctggtggggtggggtagtttctcaagtcctaaaaacatggactggaattccaacaaccgatcaactcatgtgtatgtgaactcttagtgttgacccactttgtcaccatgactgtcaagtttccttctgccgacatctgtctatcttcagggtagtttcttgtctaactcaccatccactgtgaacagcacagtacagtggtcttcaaactggttaccatgtcttccactcctgccactggacaggcattctctacactgtagctagaaggatctggggaaaactctgtttcctgtttagtcttccaaacttaccattgctttttacaatggaccaacatcttcaaccaaactgaatcccaccagggctgacctttgcctgttttccagcctcctctcctagtccttcgtgacgagcacccagaatcagggttagcagccttcctttctcttcttgatgctcctgctaaccctgcaagcttctgatattttcccaggagagtcctgttggctcttgcttaggtgcagtcccactgtatctttcttcatagctcttattgttggtttaactgaatttttctttgttggattacttaactcatgtctatcttatttactggaatgtttgctccattcagacaggaaccatttcagctttattcattttggccatcaccttgtgtgttttctacttatacaggagatgctcctgctgttccacaaatactaaatacttgctctgttaggattcttgagaataaaaataattcctcctttcaaattgtttaagtggaagataaaagacagcatatatagaggtcatgctccaaatgagttggaatggttgacagttatatgccacagacagtaaagatctggaatcttctatcatacacaaccaacaactagcaatttatcaccagctttcccaagtttttctgtgctctaggattaaaatttcttaagggtggaagtgttccctgttaggtactatacattttcatacctggaatatatattttacctaaaattcttattaatgtaatagacagtatactcaatatactgagatataaataaaaattgcttttaaagaattaagatgtattattgcagggtcagtttatgtgcaggtccatagtgtccccttgcctcccagggccacctggaaaacacaactaccatttctctgcccctcaatagtatctgtacaatggcagagcaaagcactcatttcctttttcaggtcttccagagacggaacactgggcagctggatttcttcaagcgttggcggagttatgtagaaggttttggggaccccatgaaggagttctggcttggtatgatctcagagaatcaggaaggtggggttgtggggggataatatccctcttgatgggctggtcagggcatttatggaagcttcccattttcaaggagccattcaagggacagggacactgtgttgtattgggaagggtctggcccagcagggatgggtgaagagataggactgcctgaggtggcttttattccatacctaagctctgcagaatcttctctgagcctggatttcatataactgcagtagaaggacagttgatggatttggatcccaggctctcattaagaggatgtaccagtggtccctgtaattctgctggtacagccagacattaagggcccattttccctctgctctcttttggagcagatgttcatagagagttaaatagccaataaaacatctactgggaaatacaaaaatttaaaaaaaatcgaatctggttattcagtgtcttccagagtagatgatgtttgtgcttagctaggtacagagttccatttgaggtctgaggataggcagttatttcatctattcctttacttttgagatgtgtggacacacaaaagagggctggcttctgctttggagaggtagagccagtgggcagattaccccaatactttgtcctccctgatggcatcccacgatgtcattagcattgccatgccaaagaaataagggtgagaatattagcaccccaggagaaagagttgggaaagctctttattagcagagaagattaaatataaagatgacttttatctctgactgtctcagatgcagacagtgagaactcttacacacaagttgattggttatttgaattccattccatgtttttaggacttgataaactacataatctcaccactggcaccaccactcggtatgaggtgagggcagacttacagactttcaatgaatctgcctacgctgtatatgatttcttccaagtggcatccagcaaagagcggtacaagctgtcggttgggaaatacagaggcacagccggtaagagagatgtctcactatggcagtctccttgttaccatcatctaaggattgacttgccatgtgccatggatgtgggctgtgggatactggtatgcagaggttgggtgtcttcactaacaatgctctctgaaggggcttgagggtaaaggaagcaagaataatttttaaccattaaactggattgtttttatatgttctttcccccgcacctgaatctccttttattctcccctggtttaggctgtttatacgtttttgagcaattttattctgagcctttcagtgaacttccatacacagtgggactgttatgcttgtgtgtgtgtgtgtgtgtgtgtgtgtgtgtgtgtgtgtggtgtatgtgtgagtcttattataacattttgtggtattttgctgtgtattaagacagaaaaatgaaagcaccaagtcaagcagtaagaactttagatctcattaacttacacgacagggacaacacaaagatgagtagtttagccaaaagcagggactctttagcctccattagctgctcactggcttttggccagtgggtggtgtattcagttgtaccgtgaaaggaacacaattaagcatcatgattgaactactgcgattatactgacaaacattttaagaggggatggtgtggttgttggtctaatatggatattttaaagatgatatttatggcttctctgcctttggtctgattctgactttgcttgtagtcatgtctaagtgtgttactggcaaaattagctgattttataggaagcacatggaaagagaagaataacttttgcagaccaagtggtatggtaaataaagagctaaggaatgggaatggtgggtatatcaaggacctgagtggctaggggaagcttcctggaggacatggggatgggattggctcagacagagggccaaacacagacaggaggaaaggaggggcttactacatctgagggtacccaggaggaatagaggaccaacccaaggcaaacagattgctgttttgtagggcatctcaaaattgtatactcaaggatctctgaggtctggggttatgatctgaaatagtcaactacgaatggaaaatgttgaggttctttgctatgtattgtaatgctaaatactggccctcaaggcctggttgtcctaggaatgagagaatctttatgtagacccaagtgacacatgtaaccttgacccccaagttattcctgattggtgaataaagaggcctacaggctatagctgggcagaagataggtgggtttttggttttggggcttggggcttagttttggggggcagggaccataaagggggggagagagagagggggggagagagagagagggagagagagagagagagagagagagagagagagagagagagagagagagagagagagagagagaggagtggagagatgccatggggtaggtgagttatgaatacatggccatcagggctgatgactggagttaagagtggcccagatgcaacatggcaagttaatatggtcattgatagagtagataccaaaaccatagagggtaggtatctgttcagctctagtacataaggcttattataaatataaaggttgtgtgtattttatctgggaattgaatggtcaaaggtgaggtagaaacctctgatagggattaaataatttctataacaggaaaatttctttgagttctataatttcatttcgtaaaaccataatataattttgctcatttcatagtaatctagcacaaaacctagtacagagttagtgagttttaaaacaatgagatttccagcaggattcctcatgtctaatctcgaggacactcaataccttgataggaatagatcctgagtttatttgacaagggactatgggagcaggtgggtgcctgtcaccaaggtggttgcacttgaccaagttggaactgttcaaggattctaagcaggagttacatgggaaagagtgtgcaaggaattgtttctagggaaaataattgccgtgaaacgcaccacagctaccaaggtccattttgctttggattcaccccttccttccttagatggtctgtatttctctgggctagagatgggctgtacagcctgccttccaaatggcacacaaaccgtgggagtcagctctgaaagccaggctactgggaaagtgagtggaaggattcaacacattctaaattaattgactctccctaggtacattatccatattttcagtctgactaggctctggtaactcctgttttaaagttgctcaggccaacgaggccagtcagtgaggatttttttttttttttggtttttgtttttgctttttgttttttaattcaaggagaaagaggcagctcggatacaactgggaaacagactgacctttgttcatgtgattatcagggtagttacagaatgatttaaataatcataatggttattattttttaagacaggctctgatcatgtatcccaggctagcatgcaacttgtaataatattcctgccctggcctcttgagtgttggaattaaggaatatactatcacacacaatgatcataataatttaatactaaaataacttaaattcatagtctcaggggacagagcccattacataactcttaccccacctttaaataaggtcaggttgtgtttctgatggcttctaaatgatctctaatcatttagaataacaaagggccagcaggtcagccctcagtttcctatttgggcctcctcctgctccggtcttagtgtacctgtagtctatctgactatctttcatgctgtcagtgagacttaggctttcctttcaggttagagtctcaattattacaaacctcatacctgagatcttcctggacacgtttgaagtcaggtgtttctcctcggcttccatgtcttctgtttcccccaaacctggcatccttcctagcttcttggttgagacttcattcagacccatcttttcagtttgtccctttctttccctttcctttcttggaccattagacattgccttttctgagtctagttaacataattcagcaaatgagctgatgctaatgggaaagggagtcaacatattcttaaattactgcgactctcctcccaggtaccttatttccattttaactgtgactagggggtaattcccattctaaggttgttcaggccaatagggccagccagtggaggatgtcttttttttaataggaagccttgggagactctcaaatcacatagcatttaggcagccagctagtcttcctgtgtgtgccgtcagtcagtcctaccttgatgtcctgcattacaacagtggggtcagtgccattttagctttccttgtctatgctttggttcagatgagggttttaaaatctaggaagcttcaggctatgatgcagtatagggtagaagacagatgttcaaatggaaggtgaaggtctccctgtctctgtgagtgccatctattcctgtgtctcgcttcattaatgcttttattacaacagagatgcacagcattggtggaaaggagaggcttcaagcttgtccccacctcggactgtccagctggaccgatagcttcccacttccactgaagtcatactgctttttgtttgcttctgcttcttttccttctcctcctctcttctgcttctcctccttcctcttcctcctctcctcttcctccttctcctctcttccttcttcttccaaaggaaacttcagcaaggcaatagaatgttagcttaatttctgatgttgaatcttataggctttcctatgagtcccactgttgggatgcttgcttatgtagagatggcaacacaaacatagactctgtcagagtttccattgggctacccaactttttccaacttatctcatgtccctcttgcatggggttcagccattttagggtacttaatggatgggtcctcctcctggggacacttggcaaagtgactgaggatctctaacaacacttagtagtccaggaatgacaatgtctatatagagctgtcttaacccaaagccagtgtttcctatatttttttaaaaatttttcttaggtattgtcctcatttacatttccaatgctatcccaaaagtcccccatactgtcccccccactcccctacccacccactcccacttcttggccctggcattcccctgtactgaggcatataaagtttgcacgaccaatgggcctttctttccactgatggccgactaggtcatcttctgatacatatgcagctagagacacgagctcctgggggtactggttagttcatattgttgttccacttatagggttgcagatccctttagctccttgggtactttctctagctcctccattgggggccctgtgatccatccaatagctgactgtgagcattcacttctatatttgctaagccccggcatagtctcagaagagacagctatatcagggtcctttcagcaaaatcttgcttgtgtatgtaatggtgtcagcgtttgggggctgattatgggatggatccccggatgtggcagtctctagatggtccatccttttgtctcagctccaaactttgtctctgtaattccttccatgggtgttttgttcccaattctaagaagaggcaaagtatccacactttggtcttcgttcttcttgagtttcatgtgtttcgcaaactgtatcttatatcttgggtagtctaagtttctgggctaatatccacttatcagtgagtacatatcatgtgagttcttttgtgattgggttatctcactcaagatgatgccctccaggtccatccatttgcctagaaatttcataaattcattcttttaaatagctgagtagtactccattgtgtaaatgtaccacatttctgtatccattcctctgttgaggggcatctgggttctttccagcttctggctattataaataaggctgctatgaacatagtggagcatgtgtctttcttaccagttggaacatcttctggagttttctatattttgaaacaggcttttaatggctggtgtttgagaaaaaagaattaatagattcacagagaaaaagaaaggctagatgctcaccactaccctttccttgctaccttcagtcccaggggacagatactccaggcctagtctcacagccctttgtctgaatgtgactcacaggggctatgatgtttatggcttctcctggtcttaggtcttaggtggaggctgcagaatctttatcattctttctgcactataaagcactggaggatactcagagtgacattttgctgagatggtcagtcaccagctcagtggctatactggctggttttgtgagtcaacttgacacaagctagagtcatcacagagaaaggagcctcccttgaggaaatgcctccatgagatccaactgcaaggcattttctcaattagtgatcaaggggagagggcctagtctattgtgggtggtgccatccctgggctggtggtcctgggatctataaaaaggcaggcagagcaaaccagaggaagcaagccagtaagcagcaccctctatggtctctgcatcagctcctgccttcaggtgccagctcttcttaagctcctgtcctgactttgaactatcatctggtagtgtaagccaaataaatcctttcctttctgacttgctttttggccatcttgttttgtgtgttttgttgcagcaatagaaaccccacttaagacagtggctataccttgagtgtgggtttagaccttctatgagtcttctataaccctcccaacccacacctaagaacagtttccagcaaagccaaagaacagggcattttgaatagggttcattagcagtttctcctaacactaatatgagggagtctaagcatgattggcctaactaatttttattcattatttctgagcttctatgtagtccattcgggcctcaaacttgcatttctcatgccttagcttctggggctaaggagtgtccatcacacccagatttaacttggttttacttagggaaaataaactcattgattcagaacaatgcctcggctagagccagttattttctgattcatgagcatagtcattttctatactctgaacaataatttggctttagtttctcaaaggtagaaaatccatattcagaaataataataacaattaataaaaaaaaatgttccaaacacatcaaagctcacttcctttttctagtccagggtccaaggttaggataactgaagatatcttcaagaaagcatttgtctgggtcttggaaaataagctctgggaacttcatattcagtctaggaaagctgtgcttattgaaagaatgttactaggggagccattgtgtgttatttcaagctgtagttaactgtctgtgggaaatctggagggaggagaaaaacgtaaacaaataaagccacaggctgtctttttctttgactggaagaaactcatggaggcgtggccatcttggtgtcgaagcaccaaaggatcctgcctttgctggtcaaggcatgaagggaacaaggttgtgtttgcagacttggaaggacagattgctgctaccttcctgtcttagtgtttccattgctgtgaagagacaccatgaccaaggcaactctcataaagaacattgaattggggctggcttacaggttctgaggttcagtccattatcatcatctcaggaagcatggcagcatccaggcaggcatggcactggaggagctgggagttctacactttgttccaaaggcaaacaggagaagactggctcttctacgctgggcatagcttcaaagcccacccacacttcctccaaggccataccttctaacagcaccactccctatgagccaaacactcaaaacaccatacttccctttgcacaagggtctattaattttatgctagggactgaactggtggccttgatttcctaagtgttcgcctacctcatgccatatccccaactcctatgaactctttgcgtacctgctctaactcaccctaacagagttcttaagaacaagaacctcttctgctttgtattgccagagccaagcatggggctcacccatcacagggaagtgtacatcatctgactaagtgtgtggatgaagctgcagctgtgccaggaccacatgaagggctgttgaagaacacatggctcccagtattttcacttctgtatgcctgggttaaacctagaattcacattttttgtaggttctcaggtaacatcagtgatttaggttttggggactgcctccagaactattgtcaaaggttatcagagatagactgcacttactagtaggaatgaagccctctgtgggagtgaggaggccccaggaaatctgtgtttcataaagaactgacattttagaatctgaggaccaacagttgagtcttgacaatctcagagtcttggtgtctgggaccttcggttgctgtaggtgaacccccaggattttatttccatatgggattcataagagcctggcctaccttgcaggcctgtgagagtcacagcaattagatgtaaatgtgagtgtcattgttgcaggaggggaacttgattaagcccatgattgatatgggctcttattgccttttatgaactgaaaaagcaagtaaacttctaaatggatgacgaatgtggtaggggaaagaggtgccatatgagtgaagtaattaaagcagattccagacaagatgtaacgaagcattaaattgtacatgcgtccccagaagggctctcgaagttcaggtgtgtgcatgtgaatgtgtgtgtgtgtgtgtgttggtaagtgtatgtgtgtgtgtgctcggatgaagggaagataactaggaatcttcttttatagtagagttgagctagactgtaagggaggtgagggtttgaacaatggagggcagagggcaaatgggcctgctcaccacactagtagagacaatggggttggaggttgtgcataagaggcagcccagtgacaagcctgcaaagcaagcaggatgaaccatcttctccatggtagtaggtaggatgctaagcttaagactgtgacatgggtgctgccacagggactgggagatggactgagatccgggaaagttgttgggtgaacacatgtcctcagagatgaaaagagaccttggtggccgctgtgaagaggcaggaaggatgttttgagaaagtaggttagatcaagggtatgttatccaataaagtgaatggattttgggtcaggggcagcagggagaatggtcactgtagtaaatgcagaaggacacagagtgtttatatcaagtgaagggtagtgagaccttccaagtgagaatgctgttgaagttgatggagaaacaggtctggtgtttgagggtcaggttagcaaggataacctgttcatctatatcatgttccattctgagttagttgtgacgacctgtgatacacaactgaatccttggtgttttggtcctagatatttcctgttgggacctcttttctcatagttcttgactcatagttcttttctcatagttctcatagttcttatctctcttgcaggggatgctctcacctaccacaatggatggaagttcacgacttttgacagagacaatgatattgccctcagcaactgtgcactgacgcatcatggtggctggtggtataagaactgccatttggccaacccgaatggcaaatatggggagaccaagcacagcgaggtaagtggcaggcaaacagcttttctatcacaagctttgcctgtctccactcccaaagtgatgtcatcctggtgagattgatagttccccctctgtctgaagctttcagtcaggccaggagattgtgcttcggtcttcatggtgtcaccagacaatggacactacacagtgtacatcgcactatcacacaactattcagctgcatgggagtgactcatcactgatatatgacctatgatgtgaatcgcatgctgtctcatctcattattaagtttcttttgtaatatttttgagccagggtgggtctcatgtagcctaggctgagctcacacttgtcttgtagttgaggaatggtcataaactcatgatcctcctgccttcgttttttaaattcttggattattataggcatctgtcacatctggctaaatttttgttgttgttgttcatctgtttatacagactcttgctatataacctaggttggccttgaactctgaatcttcctgccttagcctcctgagggttggggttacaggtgtgcaccaccatacctagctatcagaccctgttatggatcaggttgtggtaatgaactaccacagattaggtggtttaaaaacagacttgcgtatcttacagttctagaatttcctaatccaagaccatggtgccagccgattcatttttgatagagccttgttacttggtatggagacagacaccttctagataaatcttcacgtgacacagagagaggccatctgacctcctcaatgaacccccctccctgagagctgccccttaatactaccaaattaattgggccaataaaatttcaatacgcagaatttgaagagaacacaaatattaaatcccaaaccagacacttggttgtcttttctagttgcctctccattatagcagagctgtttctctgggtcccttgatgactaggtaaacaggttcggctttgggtcagactcagccttggctccactttaacctaagccaccaagagcctgccacaccctgttcttgtctctgtcaggacagtgttcagggctcagtgtatgtgagggctcctctcttgcaaattttcctgtctgtattttctgggacttccatgacccttgtatgtcatggtgactttttgccagctacaggttatctatgacccctcctggcttcctgaaaattacacttttctcctattcatgtcaatctcttgccctccataaacctgccttgggtttctaatttcaagtcctaggtcctgatcctggctttcaggcagccacctctctccagaactcacacagaccaatattactgtaaatattagcactgctcaaatccaggtgcattcttattactgtagttcttaccacacaatcaggactcccaatccttatgtgatattttttttaaagggaagaagaaatttgcccctagggcaatgaagaaggttggcccaatgaatcatggtggcagcatgtgggccgaccagggaagcctgtgatcagagatcaaatatttgaaatgagcagtcagcatgccctaaaccatccctgtatttgctaataaaagacattcatctggctaatgtgcttctctcgctctgcaagccatttagcttcttgtttattatttacttcacaaattaaaatacataaaattggtcacttgggctctttattggccaggttgcaaggttattaagtgaattaaatattattgtgctcaccagtcaaaagacataaagtgaaatttagttttcagcaggccatttgtcaccccagcgctaatatctaaacagtctaaattgaaaatgattttacacaattggctaattaatacgtttatttttgccttttatttttttgaaaaagaacagggtacggcaatggctgattgactgctctctgcctaagttgatcgtcttgtcaaccttgtgttctggccttccctacatcttgggcacacaccccatcttcctaccacagaggtttctttctctctccactcagcttgtcgaataccaggagagggtacatgatctggaccttgtattttggatcataacccattactgctagaacttcctcttctttttcttcctccatcagagacacagtgatttcttgttctctaggattcccccccccccccacaaaccatcttactcttctcccaaacacttgatgtttgatgtttgttttgcagggggtgaactgggagccatggaagggacatgagttctccattccttatgtggagctgaaaatccgcccgtttggttacagcagagaccgtttctctggcagaaagaagcgctccataggaaaagcaaggatgttctgaaggcttgtctgagctgtcttcacaggagacaagagaaacttggggttggcggggtagatggtgcctaggaagctgaagtttgagggatgctcatagcctccgacttcctagattgctgggtacacagtgctaatgacgtcatcacactttgacctttagaggttccttccatgtcatctgcaagtttgcctgtctctactgagggcttcattgttggctttcaggagccaacaatgttgtaactgaacagtacatatggatagaacacgtgttggaatcacaaggtttttcagcccatccttaatgacagatgtattgaattagggcaaaaaggtgaaccatcctgtagaccatcaattggaaatctttagaaattggtggatatctctgtatccatctgataatatagatctttgtagaaaaaaaaaagacaaagtgaggttctgatcccctgggtgtcagagctgaggcgacctgctacttcttgtctctcctggacctcctggtgtttgaaggaaatgtttatatcttactacttttaaacttcctgtgtgatgaagaatgaagagactacaaaggggccacgatgcagtcatagttaagttctgactagtctctagcattctagagaccaaagctcccattttattgctatttttaactgccccttttccagacatttgcataagttctttcatagatctgcatatgttgtaaataaatttgcagtcatttaaactttaaataacccatctctctaaataactggtcccctcagctccccccgcccccacttcactcacctccatgcctctcccctctcccgggtccatcagccctcagcctccctccttccctgctccccgcactggaagcttcctcacatcatctttcttgcgtgtttggtgtcattttggaaagttttctgtaaccaagtcagtgacctttgaagtaacttaaattcctactcaagaaaacacaaataaactgtttgatttttaaaaagccgtctcttgttattttctccccagagagatggcccacaatagcaatacactcaactttttgcaggcttgctaagcgcgcttaagacattgtcttggtcagtgttctgtggctgtgaagagacatcatctccacagcaactcttataaaggaaagcgtgtaattggggctggctgacagtttcagaggcttagtccattatcatcactgcaggatgcatgggcggcacacaggcagatatggtactggagaggtagcagagagttccacatccagatgtacaggcagcaggaagggagagagatactaggcctagcttgggcttttgaaaccttaagcccccccccccccagtgacacacttcctccaataagactatgcgtacttcaacaaggccacaccttctaatccttttcaaatagtgccactccctgatgatcatacattccaatatataagcctatgggaccattcttattcaaaccatcaccggctagattgtggactccctcttcagatgttatgactcattctaactgctcctaggattgctggcctctctatgtctgtgcagatctatagccaaatcagtgacccatagtctttgttctggaggaggctttgatggccccagatggcaccatgcccatcttaggttcattaaccccagggtttggccactgaactgacctgtgtgggagactgaagctgttttagcatctttttgcttataggtcctttgttgccatggagaaatttcagctgaccttcaaatagtttactctgagcagaaaaggaaatctgggaagttcatttcagagtgtttatagagtgggcaacatccaagcccccacccttcctgcatgctgccccttgctctagcatggtccgtccagcagtttattccaagcttaaaggaggccatcccatgcttcaggatggcccaatgtgaaaggggacgtgagaagtgaggatacactagaagccaggagcagagcatctgtcctacaaacggcggtaaagtttccaaagtgttatctattctgtgcatacacaaggcagagaggagcaaccaagctactggccctggtcaactcttagaacttctggaagatagaaaacaagtcaggacggtggtggtttaaggaaaaagtgagtcactaagagagagagagagagagacagagagagagagagagagacagagagagagtgtgtgtgtgcatctaatcccaccacaaaggctttagggggctgtagtgatggcatcagatctagaaatgcaggtccgtgggtgtgggggggaaagggagttccggtgctctgggcaggcagatgcgggtggactgcttttcacatggccctgggtgggcatctggctgtgttaagccactgaccccacatggcgggtggtggacaaggggcagccccaggtaccaggttctcagcctctcgtatcccacgctggatatggtggaggagctgagaacagaataggggccccagcagcacttggccctggagatgaggggaggaatgggcagggggaggggcgctgggtggttcccacaagggtgagagtccttggtcaggtctgtggctggagcacaggatggccttctggcgggatgttagacgcggcccatcccatccttcaagcacggcgggccttgataatcagagacatatggttttagagctttattgtagaaaggcagggagaaaggagggaaggtagaaagagagagagaccagccatggccacgtggagagaggggggaagggaaagagagaaagagaactagagagtaagaaagatgagggcttaagagagtgaggagggggccaagcagcccctcttatagtgggctgggctatcaggctgttgccaggtaactgtggggaggagcgtacctaggctatagtcaggtaactgtggggtggagtctagccagaatgccagaagcttgggacatggttggtgtgacttagtcacagaattatggacagacacctgattctgtgaatgtggctcgcctttctgtcccttgtagatttctctattgggtcactggagcaagccccattcaaccaaaataggctgcccatcacagtcccacatagaaagacagactgagtcatgagggaagcagccagacatctgagagagccaggctgcacatggacagtatgggggaggcagtgtggcttctcagtggttgaggagcccagggagccagtgggaaggacaggcagggggtcattgctgcaatggctgtcaggtcacattgccattcagagccagcatgagctttgatgtgtgtccttctgctcattgccccttcacaggtcccattccagtgggtctctagtgagttctacgcacctgagcttttcaaagttccccaggggcctctaacatcaactcaggggtgagagtcattgttcccacataagcctttgaatggcggagagctctcagaggcttcgaaaccttgaagtgacacgggaggcttgtattttggaaatattagtttggtgacaggttgaggagggccacagagtggggattttgaaaactacttagaaaattgtgtgtgtatgcatgcgtgtgcatgtgtgttcacatgtatggacaagtgtgtatataggacattaccctgggtctccttttgctactttctacttcatttcctgagacaggctcttattctgaacccagaactcgccgatgtgggcagtctagccagccagtttgttctgtctccagagtataaggatttacttcaggtggggctgccacgcccaaccatcaagtcctcacacctgagtagcaatcacttcttccacggagctatctcccggcccttgtgttatctttggttgacacaaatctgtggggtaaagcatgccattccaatatgcacgtatatgtgaagtggtcagcgcaggtgacaggcatctctatcactgctgacatatatcataccttggtgtggagaacatgcatagacctctctaccggttgctttggaatacacagttagtccttgtcagccatagttactccactgtgattcagaaagtcagaagtcattccttctgtctgtgccccttgcccatccacaaggggtgtggtctagggggaagtggggaggctcgcagaccagctcacagctgctgtaatagttctccaagtagtactgagtcccttggtctgtgtcagaaggggatctatagaatcagcaggagtgagggaggactggcttcagaggccagcctgtgaccacagagcttgaagatgtttatgtgtcacggctgctacctctggaaatggcttggcatttgtgtttgttgagtttgagtgttccgttttataacttacaattattggggattcaagggctactgaagctggaatatactgcaggagagagtgaggaagggggagaaagagagaaacagaagaaaataaagaaagagagagaggcagagacagacaaacacacacacacaatttaggtgtgggttgtgcaaagagagagcatgcagacaaggaggcatgcaaagaactagaagaaaacgtggtgaaaagctgctggtgaaacttagttattagaaaaggtcctcccatttaaaaaaaaaaaaccaaaaaacttacatgtcttcactaccttaggtcttccaccagggtcaaggagaggatcaacagagatgatgggaaccaatcaatcaggttggcgcctgcagtctggggcaagcaggctgctatacccactcttgccagtagatggcagtgttgtcttatcaggtgcctctcaaatcaagagagactctctcccacaaagggaggttctggaagggtccccacttctctgttccttcctgggtaactctgtcttacccagtggggccaagtcagcagccaacctgcacttagtggtttctccggcagtgtttctacctggattaacacaacaggtaagcaggcaccccctggaaggggttgcctagctcattcttggttgtgtctagcctgcaacctctctatcacagtgtgctaggctggtcagtgtgtagaaagttccagggatatttcaaaactcttcctaaaatgcccctgtgagtgaattgtttctgaggacactttaagttccagttccagtgttatataaataaggttaccaggttagctcataaaaccctgctcatttatagaagacaaacttctatataattatatataaagacagcaaagaatagttctgaagcctgtaaactttagctcttattatatttggcttgccagcttttttaacgttttaaaaatatttattttagaattacttatttgattttatgtgcccaagtgttttctgtctttgtatatgtatatacacaggcacatgcttggtgcccatgaggctagaaaagaatgttggctcccctggaactggaattacagatggttgttagctgctatgagggcctgggaaccaaacctgagacctctgcaccaacagcattcgaaacttttgcatgctctttttcctcactaggagatatgaagagcctgttgtaaggctggttttctgtgaattgtcaagaggactatgacagatcatgggtggaagagagagaaaggctggtgaaagacaaggaggttgctggagtgtgggtaattccatgccttcctccatacatttcttttttgatttctagaacacaaaccatggttttccttcattaatgacacttaacttgagcacttaagccaggctcagtgctaagtggtttttcttttttttttttatgtatttctccatttaatttctgaagataagttttaatatggaggtaacatcacaggcataaattacatgtgagaactggtgtgggtcccaggatactggacagccctagtcctcagccccagccctcggtgctcagggactctcgtctattctgccaataatagcctcctttctccgctcacccagtgcaacactttgccagcctgacttgatgccagtcttggtgggtgtgttcctctgggaaagcgacaaacacattatatggttgtggtttgttcctttaggccagttgtgacccttcaggacaaatactctggtatgggctcagtggacttggcacctcgaaagagctaaaatcctttgatatgcatgccctgccattactgaataaatcgtgatgcttggccccatgggaatctgaaaacaattcaataagttgaacctatgaccgatacagtaagttgtccgaagggagttttgttgctgctgctgttcaagcttgtgtgcctgtgactttgaattcaagaataatcttaagggcaaagggcaagcagccagcagagtactccagttgagaatgctaatggatggttgcattgcgcaactctgtcctaacgctccgagtgtgggtgagcctgagcaggcagagttgatggagctggaagggtggtgagccaatgagatgcctgggagttgcactatcgcctctgggcggcccctcctctgcatcagaaactttcacaatattctagagacttgaatagcaggttgaatgaaaattctctgtcccctggttgtcatagctttgtaatgataggagaaaagctgaaggatcagccgaaactgtgaaacagcctgccttgggcaagacaggaagtgtgcagctgcgccgtgggtcttccttctcaagcttccgttaaacagcgcagctgttcactaacactgaattactctttccacaagatgctagcctctgccattcagggtggtgttcctagccatagggtggctattgagtgcttgaaatatggctggcataattgagctctggacttttaatctaatttaattttaatgaacagagccacatgtggctaatagtaccagattgggcagtgccagtcgggaacatttcaccatcttgtttctgttggcccgcactctaggtaagcattgttgggaaaggaatcaagagcatccaagtcatttcattttctaactagggcaaagttgtggttgacttagaaaaaggataaatgtgcttatataaatacatgcacatagacacaggtatctgtgtcccttggtcctttgtttcttagcaccagattaacccaaaggttatttcttccttttcctatgaaagacatggacttcagtggagaaatgttttctaagtgtcgccagggaacatcagtatgttttctgcagccgttgttgctcagttcagcttccaaagtcgcctgctttgcgtagaagggagagatgccacatttctggtcctcagacctgagattctaggaggccagggaccaggcaggaagagcctctgcttctgtcaattctgtgtgagaataatatctcagcggtaagccagtgactcaatccaacgtgcgaggaggatttcattttcaaaacatttatttaaataaacttttatatgtatttgaattttacagaaaacaaaacactgacaaatactgtacagcttcgatcattcatatgagcgattcatttcttgaaaaagtgactggcttttctttacatcttcctgttctttttcctcttcccaagaaatcaaaaaaagtctattggacactggataaagacccctctgactgtttctgagtgtgactaaggcaggccagaagtccagtgtgggtggggacaaccccaatgcccaagtccatgccagttgagaaggtctcttctttatgcatcttcttttcaaattttcgaaaaagatttattttatgtgtatgagtggtttgcctgcatgtatacatgtgtaccacatgcatgtctggtacttgggtcttctacagaagcaacaagtgctcttaactgctgagccattcctccagccccctggggcctcttaggttcttcatgaacttactgtccccagatggatcaggtaggcacaagtcccaagcaccttaccctaggactgtatccgtggcaactctggaatagaccaagggaaacagtgtctgtagagtcataaaggaatgaattggcatgatgcaaggagaagcagtaatatgagaagaattgtcagggtgaggcagggcgacagggcaccaagcaatactttgggcttctgctctctggtgtctatgggagggcctatcacttcatgggccctgtatcatcctaagtgctctatcaaggctgtcggagagtctgcgacaggaagaggtgatccagtcacggttgggattccaggatatagaagcaactgggaactgcctttctggatggtttatgtcaggaactggctcaagtctatttggttagaaagcagtaggtacacttgtgtccagagtcaggggctttgttatggcaatcagggacaactgactgctgtcttaattcaaactggcagccagttgtcacggaaaccgtgtaatttgtatggtccctgattccggcgatccatccttgcagactgttatctgacatcccatttctgctgtgtcttcacctctacccccaagtcttctgtcttagggcaactgagagaagtgggaagagcatctggtgggtaccaattggcagagaaggggagaagactggtcattctgtgacatgcggaggacagccaggtaatccacaaccagctccctatgtgacaagggggcagagaatcaggaagtgttgctttggtcaaagaggcctgagggtggaaggcttgagtgcctagtggcattgaggtgatgtaggatgagcgggtgaaatgtgactgtctgctagaaggcccaggtagccaccattaggtagctaccctccaagggcctggagcacatcgggagtagacatgagtaccaggtggcccagctgaacgtagggtacaactttacattcatagagtctcatcaattttgggaattttttcttgctgctgtaatgtcataatttggctatgtcattaattagacagtgatttttctactgtctataatggtctccatggggacaatatttatagagctccccagtagatgtgcaaatgagccgttggagtataatcgcttccaagctgggaattctctgcttttgtaacatggccacaatacaatcaaaatgccaagcaatttgttttctttgactggggaggaaatgctctcttccactcagaaagtggcatggcttcaggtaccacagggcacatatgtcaatcaaccctggtctcaatgccttgcctcaccttctgtagcagttaatggcgtgtcttaaaagagtaggtcacccaggttgaattgtgaggtattacaagttatccttagcatcattgcatatccatccacagttatgagtacctactgtgtacaagacatttgcctgagcatcaacataaatagcaacagatacctttatagttttatctttcatttaaactatggcttctacctcccactggcaatacattatgcactgctaccaacacaggattgcttctggtatgtgttgtgttgtgtatgcgtgtgcatgtgcaagtgtatgtgtgcatgtgtgatggttatgagactggacttgggatgatcttacttggtttctttctggaagcccttggtcacacggattatagctagctcatgcgaggcatctctccttacgctttctatctctatattacatctcgtgggtacacacctgcaatccagtgaagtgaatatgtgggtttccatagctttctcatagtcactgccaagagctgttcatcactgcttagaaaagggcaccttgctgagtagttatggggtaatgtccccgagaggtcttgggccacattagacatctgttagaggtaatgaggaccttgtcgtgaattgcaagcaaagagctttgagtgtatctggagccatactttaaactttcaggtataggcaaaaggtcagaagcatatagaaaccactagctatgtctgtatcaatatatactgaagtggggactgtaccagggtcttagaatgtccaaatgtatttccagtaaaacattatgtaggaatagaacacacccatctccaacctgaatgatatacagacagtgcatagggccttgcaccatggcttcttaattgcacatatgtgcctaaatctggacatatcttctcataacacatttctgcaagtatatatatttgagcaaaaatatatattacatggctgcgtgataaatagaatatcctgtcccatgtacctgttgtccaaatgtgcatacatatgatacaaacagagttgaaagccatctaagatgcatatgtacatactttctgtgcttttgtgctggagtataccagaaactgctgtccatgcttggggcactgatacgggacacatagctgccaagacagagtaagaattgtctacacgccgcccccatccattgggatgcgtagtctgaaatttgtcccttggttgagtgatctgtgggagtgaatgcatcacgttaaaggctcctccaagtctctgtggttggaaggaggctcggctccaaggggaggacacgctgcccccttgctcactagacaagcagtgatggtctcttctccatctggaggagcttgggctgagcagagatccagaggtcttcatctttctttttcttcttctttttctttttcttcttgttctggtctggctgttggttgctcttaggtggccggctacagcagcaatggcaacagatgaagaagagggtgagaaccaccaccaggggcaaccccaggagcacagccaggcagactgtgttgaagacgcctctttcgtgtctgatccggatggtttcccagacagagttgaagaaagaactgtttctctccatggtgctggtctagtgtggggccagaggatcgtcaattatctaacaagccctcggtgtcacagaacacagtgttagacacttggaatttatttttctctcagcttcacgtttgggcatgccaccaggaacacctg

SEQ ID NO: 1705 - DNA, 5727 bp, Mus musculus
atgctcgccttccccctgggatttctgcttgcttctgtgctcctggtggcttcggccccagccactccagagtctcccggctgcagcaacaaagagcaacaggtcactgttagccacacctacaagattgacgtgcccaagtctgctctggttcaaagaccgaccccacagtcactcagcgatgatgggacatcactcttggctcccggggaggatggagaggagcagaacattatcttcaggcacaacattcgtcttcagacaccgcagaagagctgtgacctggcagacagtgtccaggacctgctagcccggatgaaaaagctggaggaagagatggcagagctgaaggagcagtgcaataccaaccgctgctgccagggagctgctgatctgagccgtcactgcagtggccacgggaccttcttccctgagacctgcagctgccactgtgaccagggctgggagggcgcagactgtgatcagcccacctgtcctggggcttgcaacggccacgggcgctgtgtggatgggcagtgcgtgtgtgacgcgccctatgtgggggtcgactgcgcctacgccgcctgtccccaggactgcagtgggcatggcgtgtgcgtgcagggtgtctgccagtgccacgaggacttcacagcagaggactgcagcgagcagcgctgtcctggcgactgtagtggcaatggtttctgtgacactggcgagtgttactgtgagatgggctttactggccccgactgttcccaggtggtggctcctcagggcctgcagttgctcaagagcacggagaactctctgctggtgagttgggagccctccagtgaggtagactactacctgctcagctactaccccctggggaaggagcaagctacaaaacaggtccgggtacccaaggagcagcacacctatgacatcaccggcttgctgcctggaaccaagtacatagtcaccctgcgcaacgtgaagaaagacatttccagcagccctcagcatctacttgccaccacagatcttgctgtggtgggcacagcctgggtaaatgaagagactgagacatccctcgatgtggagtgggagaaccctctgactgaggtggactattacaagcttcggtatggccccttaacagggcaggaggtgacagaggtcactgtgcccaagagccgtgatcccaagagcagatatgacatcactggtctgcagcctggaacggaatataaaatcacagttgtgcccatccgaggtgatctggagggaaagccgattctcctgaatggcaggacagaaattgatggaccaaccaatgtggtcacaaatcaggtgacagaagacacagcatctgtttcctgggatccagtgagggctgacatagacaagtatgtggtgcgctatatcgcccccgatggggagaccaaggagaaggcagtaccaaaggaccagagcagcaccgttctcacaggcctgaagccaggagaggcctacaaagtctttgtgtgggctgagaggggcaaccaaggcagcaagaaagcagacaccaaggccctcacagaaattgacagtccagaaaacctggtgactgaccgggtgacagagaacagcctctctgtctcgtgggacccagtggaggctgacatcgacaggtatgtggtaagctacacttccgtggatggagagacgaagcaggttccagtgaagaaggaccagaggagcaccgtcctcaccggcctgagtcccggtgtggagtacaaagtttacgtgtgggcagagaaaggcgatcgggagagcaagaaggccaacaccaaggctcccacagacatcgacagccccaaaaacttggtaactgaccaggtgacagagaacactctcagtgtctcctgggaccctgttcaggccaacattgacaggtatatggtgagctacacctctgccgatggagagacaagagaggtcccagtgcctaaggagaagagcagtaccgtcctgactggcctgaggccaggtgtggagtacaaggtccatgtgtgggcccagaaggggacccaggagagcagaaaggccaacaccaaggcccccacagatattgatggccccaaaaacctggtgactgaccaggtgaccgagaccactcttagtgtctcctgggacccagtggaggctgacattgataggtacatggttcgctacacgtctcctgatggagagaccaaggaggtgcctgtgtcaaaggataagagcagcacagtcctgaggggcctgaggccaggtgtggagtacaaggtggatgtatgggcccagaagggggcccaggacagccggaaggccaacaccaaggcccccacaggtatgaacattgtagccggaggatgtgacatatttcatgatattgacagccctaaaaacctggtgactgagcaggtgacagagagcactgccaccgtgtcctgggacccagtagaggctgacatcgacaggtatgtggtgcgctacacttctgtcgatggcgagaccagggaatttctcgttgggaaggaccaaacaagcaccgtcctgacaggcatgagaccaggtgtggagtatcaggtcgacgtgtgggcccagaaggggacacaggaaagcaggaagaccagcaccaaagccccaacagatattgatggccccaaaaacctggtgactgaccaggtgaccgagaccactcttagtgtctcctgggacccagtggaggctgacattgataggtacatggttcgctacacgtctcctgatggagagaccaaggaggtgcctgtgtcaaaggataagagcagcacagtcctgaggggcctgaggccaggtgtggagtacaaggtggatgtatgggcccagaagggggcccaggacagccggaaggccaacaccaaggcccccacagatattgatagtcccaaaaacctggcgatcgaccaggtgacagagaccactctcagtgtctcctgggacccggtacaggctgacattgacaggtatgtggtgcgctacacctctgctgatggggaatccaaagaattcctgattgggaaggaacagaggagcacagtcctgacaggcctgaggccaggtgtggagtacaaggttgaagtgtgggcccagaaaggagcccgggagagcaagaaagccaacaccgaaggtcacacagacattgacagccccaaaaacctggtgaccaatcaggtgaccgaaaatacagccaccatctcctgggacccggtgcaggctgatattgacagatacatggtgcgctacacatctgctgatggagagaccagggagattccagtgaggaaggagaagagcagcactgtcctcacaggcctgagaccgggtgtggagtacacggtccaagtgtgggctcagaagggggcccgggagagcaagaaggccaaaaccaaggcccccacagaaattgacagccccaagaacttggtgaccaaccgagtgacagaaaatacagccaccatctcctgggacccagtgcgagccaacattgacaggtacatggttcgctacacctctgcggatggagagactaaggagattccagtgtcaaaggatcagagtagcaccatcctgacaggcctgaaaccaggcatggaatataccattcatgtgtgggcccagaagggggcccgggagagcaagaaggctgataccaaggccctaacagaaattgaccctcccagaaatctccgtccgttcggggtaacacattctggtggggttttgacctggttgcccccatctgctcaaattgatggctacattttgacctaccagttcccaaatggcaccgtgaaggaggtggagctcccaagaggccagcagagatttgaattgcaagacctggaacagggtgtcacctatcctgtttccttggttgccttcaaaggtaatcagcggagccggactgtgtctaccaccctttctacagtggatgctcgctttccacacccctcagactgcagtcaagttcagcagaacaccaacgctgccagtgggctctacaccatctacctcaatggtgatgccagccggcccatgcaggtgtactgcgacatggacactgacggaggcggctggattgtcttccagagacggaacactgggcagctggatttcttcaagcgttggcggagttatgtagaaggttttggggaccccatgaaggagttctggcttggtatgatctcagagaatcaggaaggacttgataaactacataatctcaccactggcaccaccactcggtatgaggtgagggcagacttacagactttcaatgaatctgcctacgctgtatatgatttcttccaagtggcatccagcaaagagcggtacaagctgtcggttgggaaatacagaggcacagccggggatgctctcacctaccacaatggatggaagttcacgacttttgacagagacaatgatattgccctcagcaactgtgcactgacgcatcatggtggctggtggtataagaactgccatttggccaacccgaatggcaaatatggggagaccaagcacagcgagggggtgaactgggagccatggaagggacatgagttctccattccttatgtggagctgaaaatccgcccgtttggttacagcagagaccgtttctctggcagaaagaagcgctccataggaaaagcaaggatgttctgaaggcttgtctgagctgtcttcacaggagacaagagaaacttggggttggcggggtagatggtgcctaggaagctgaagtttgagggatgctcatagcctccgacttcctagattgctgggtacacagtgctaatgacgtcatcacactttgacctttagaggttccttccatgtcatctgcaagtttgcctgtctctactgagggcttcattgttggctttcaggagccaacaatgttgtaactgaacagtacatatggatagaacacgtgttggaatcacaaggtttttcagcccatccttaatgacagatgtattgaattagggcaaaaaggtgaaccatcctgtagaccatcaattggaaatctttagaaattggtggatatctctgtatccatctgataatatagatctttgtagaaaaaaaaaagacaaagtgaggttctgatcccctgggtgtcagagctgaggcgacctgctacttcttgtctctcctggacctcctggtgtttgaaggaaatgtttatatcttactacttttaaacttcctgtgtgatgaagaatgaagagactacaaaggggccacgatgcagtcatagttaagttctgactagtctctagcattctagagaccaaagctcccattttattgctatttttaactgccccttttccagacatttgcataagttctttcatagatctgcatatgttgtaaataaatttgcagtcatttaaactttaaataacccatctctctaaataactggtcccctcagctccccccgcccccacttcactcacctccatgcctctcccctctcccgggtccatcagccctcagcctccctccttccctgctccccgcactggaagcttcctcacatcatctttcttgcgtgtttggtgtcattttggaaagttttctgtaaccaagtcagtgacctttgaagtaacttaaattcctactcaagaaaacacaaataaactgtttgatttt

SEQ ID NO: 1706 - protein, 1573 aa, Mus musculus
MLAFPLGFLLASVLLVASAPATPESPGCSNKEQQVTVSHTYKIDVPKSALVQRPTPQSLSDDGTSLLAPGEDGEEQNIIFRHNIRLQTPQKSCDLADSVQDLLARMKKLEEEMAELKEQCNTNRCCQGAADLSRHCSGHGTFFPETCSCHCDQGWEGADCDQPTCPGACNGHGRCVDGQCVCDAPYVGVDCAYAACPQDCSGHGVCVQGVCQCHEDFTAEDCSEQRCPGDCSGNGFCDTGECYCEMGFTGPDCSQVVAPQGLQLLKSTENSLLVSWEPSSEVDYYLLSYYPLGKEQATKQVRVPKEQHTYDITGLLPGTKYIVTLRNVKKDISSSPQHLLATTDLAVVGTAWVNEETETSLDVEWENPLTEVDYYKLRYGPLTGQEVTEVTVPKSRDPKSRYDITGLQPGTEYKITVVPIRGDLEGKPILLNGRTEIDGPTNVVTNQVTEDTASVSWDPVRADIDKYVVRYIAPDGETKEKAVPKDQSSTVLTGLKPGEAYKVFVWAERGNQGSKKADTKALTEIDSPENLVTDRVTENSLSVSWDPVEADIDRYVVSYTSVDGETKQVPVKKDQRSTVLTGLSPGVEYKVYVWAEKGDRESKKANTKAPTDIDSPKNLVTDQVTENTLSVSWDPVQANIDRYMVSYTSADGETREVPVPKEKSSTVLTGLRPGVEYKVHVWAQKGTQESRKANTKAPTDIDGPKNLVTDQVTETTLSVSWDPVEADIDRYMVRYTSPDGETKEVPVSKDKSSTVLRGLRPGVEYKVDVWAQKGAQDSRKANTKAPTGMNIVAGGCDIFHDIDSPKNLVTEQVTESTATVSWDPVEADIDRYVVRYTSVDGETREFLVGKDQTSTVLTGMRPGVEYQVDVWAQKGTQESRKTSTKAPTDIDGPKNLVTDQVTETTLSVSWDPVEADIDRYMVRYTSPDGETKEVPVSKDKSSTVLRGLRPGVEYKVDVWAQKGAQDSRKANTKAPTDIDSPKNLAIDQVTETTLSVSWDPVQADIDRYVVRYTSADGESKEFLIGKEQRSTVLTGLRPGVEYKVEVWAQKGARESKKANTEGHTDIDSPKNLVTNQVTENTATISWDPVQADIDRYMVRYTSADGETREIPVRKEKSSTVLTGLRPGVEYTVQVWAQKGARESKKAKTKAPTEIDSPKNLVTNRVTENTATISWDPVRANIDRYMVRYTSADGETKEIPVSKDQSSTILTGLKPGMEYTIHVWAQKGARESKKADTKALTEIDPPRNLRPFGVTHSGGVLTWLPPSAQIDGYILTYQFPNGTVKEVELPRGQQRFELQDLEQGVTYPVSLVAFKGNQRSRTVSTTLSTVDARFPHPSDCSQVQQNTNAASGTIYLNGDASRPMQVYCDMDTDGGGWIVFQRRNTGQLDFFKRWRSYVEGFGDPMKEFWLGMISENQEGLDKLHNLTTGTTTRYEVRADLQTFNESAYAVYDFFQVASSKERYKLSVGKYRGTAGDALTYHNGWKFTTFDRDNDIALSNCALTHHGGWWYKNCHLANPNGKYGETKHSEGVNWEPWKGHEFSIPYVELKIRPFGYSRDRFSGRKKRSIGKARMF

SEQ ID NO: 1707 - DNA, 90614 bp, Homo sapiens
gagggtctctgctcatttctttctgtgctaaaggctttttcccattttaaaagcagtaggcaggaagtcccagaatgcctgaaacaggaaaaagagaaagaaactttataaatgcacttttgaaccccgagacccagctcctggccaggagacaggcaaactcttttaatatccttattctggattcacttaaatggaaacagcctccagtatttttagctgctgtgtaatcaaagtgaaaaagaagaaggaaatgtatatatttttctttcctagttagaataagagaaggaattgctcattatcttttagcagagtccctgctaggaagggaggaaaacaccaggagtctccatttgctcctcctctggcctagacaggatttaaacccaggaagggaagccaaggagagacgagaaccagggacgaccagcaagtaccaaggtctgcggcaggaggagaccggctcacaggagcagcagcattggaagaggcacccagcagcctcccaggtaagagtgccagttgcccaagctttacttactggagggagggaggtggccaatgcagatgagctcaaaagtggtggctcaggtgcctccgttcccgagcctgaaaatccgggcagtgtaattagtctcctatcacctccatgaagagttaaaatgaattgggaagtacctctcaggacccgtgtactgcatccttagtattatactccagtctcagacagggctaagcatagttatcctctttcctgcaacacagatgcgtctgtgttgtatcagcttctacctggcgtaacacatttttgtataaaatgtttcctttaagatgttccttctcatttttttttctttttaacttacttacaatgtcaaagctttctctctctctgtctttttttggataatttagtattgttgtatttcattattcttttaaatcctaaaacagaattgttattttagttatgattaggaagctatgataactttccctttgtctggattttgtgtgaatcagttaaggggatgtttgcaaacacatttgaacagctttgaagtatctccagacatttaattttacaggttttaattattatttgttaagacgacaacttctctcgaaatccccatactattaccctcacaatacctcaaagaaaacatttcaagacatctaaaaaaatgatgtggttggccgggcatggtggctcatgcctgtaatcccagcactttgagaggctgaggcaggtggatcacctgaggtcgagagttcgagaccagcctgaccaacatggagaaactccgtctctactaaaaatacaaaaaattagccgggcgtggtggcgcatgcctataatcccagctacttgggaggctgaggcaggagaattgcttgaacctgggaggtggaggttgcggtgagccgagattgaaccattgcactccagcctgggcaacaagagcaaaactccatctaaaaaacaaaaacaaaacaaagcaaacaaacaaaaaaaactagtttttggaggtcttactttttacttatttattaatttttgtgcttgggagagatctgggggaaggatggagaaagaatgaatgagaacaggcagggcttcacttaaaagcatgaaacctgtgttgcttatataagcattaaaaaaaagaacaagttccaacataaaagtaacaaactgcccacattgggacacaggttagccacagtgcctaaaatccactggttcttggaaaagctgaggtgtcaccaaggcatcagatgataccttgctcggtcagggctacgtattggcagctggcctcttgacattcagacatttgttgcagactcagaatcaaggtgacagtgtcagacacaggaaaaaatagagtatcaatactggtatcatttttccaggagagaagggaagaaggcacctggcattctttcatacaactctaagtactgctttgtccccagtttataggctgcagctgactcccgaaggagggaaaatagaacaaatgatttcaaatcatcccgtggcttctggttttccagtccagtgctgctctgtggtttgaaatgtagggtgggcagagctctctttctgagaagatgcctgaggaaattgtgcccaggcccagtggaaacttttgtccattcactgctcattccagagccttggctcctataggatctggatacagacatgagatcatggtttaggtcctgtagccacatctggagccaccagtctgtgagcagaggttgctaagatctcaggcctgatctctggatggacagggactttgctgcttctgccacagtggactcactgctaatgctgcccagccaccatttgaatctgtacccagcgagtgtgagtggaacagtgcaaatgcttggaaattagcaaacgctctcctccttgctagaagactggaactttaaagttacttcaatatgtggaaaacaacacgttagctaaagaaagaaattgcagagttttttgttttgttttgttttaatctgacgcccctcacacccatggatattagggctaattgtatacaaagtaatatttagtcattctggggactggctgtttggttgaataagggagaggaaggttcctgaatttaggtcccgtgtctattttatcttgttattgtgcatgagcttggtcccacaaaagctaaaggaagttcttgctgtgagaaagtgattcattctctgggggtaaatgaacatctttgcctgatgtccaagaggagattttaaagtgctttgcacagagcctggcatgtaataaatgcatagaaaatggtagctaccattatcatcactcatttgagcctttgcaaggcagattaagagtcagttgtcaaaacaaaacaaaatgagcctgtggtcacccctgaaaaagtgattgagtgctgaggctgggtcaggacaccatccttgatcttttcaagcctcaggcgggtgggcagacttgatgggatggctctccaggaaaagggttctagcacggtggtgtgagagtcatctccaaggacttcctggacactccctgggtatcccacagaactaggagaatggggggacagagtgatacccagaatgtgaccatactaagccctatcacataaaaccaaatttccattctcttccatacttagctgtcttgtatcctatatgcaatcctatattcaacatcacagagactagaaataaaaatgtttgtatgtacttgcttctactggagtttaacctaggagagacagacctcccttgtatatccattttcttggatctgaaggagaaagagatacagaggtgaaatcggtcccctaagcctctagttcaaggtgagttgagccagggtagattcctcagccagctgagaacttgctgtcctggaccaggttacttgggaagtacagggaaggcccctgagtcacccagggcccaagctgcagatcattagcaatatatgccaaagagagttaaggaaggagtgacaagtttgccagtgacatttgtgacattgatgcatccctagccactcatctccctcattttccttcatagtttaatgatatccaccctgtcatttggggacagaatatcttcttaagtgactctgttggaaatccatgatgatacactttttctaaaacccaaagcagtgctttcattttcctgtggttaactgtcaaggcaggatgagataataagggaaccagagaaagccctgaatttaagtataaaggtctgtaacagtggctagaaattggctacctctcttctttggcgtaagtagtattttttttttcctgacccagggtgtgtgtccttctttggggaaaatgaggtgacacagaaaccatccacccctggggtccaagaggaccatcaggattcaggggccatcctcctcccttggccaaggcttggatgccatctgcccctgcagacagaagtatctgtgcactttggtgtttcctaggaagggaattctccagcttctcatgagaattgactgggacttaacctctatgtgagggaaatgcaattcatgtccccagtggatcatccttggcaccactcagaggaagtaaccctctcttaaaaacacatggcagaacggaggacatctggtgttttttttgtttttgtttttgttttgtatatacaggacatataacagacagatgaagaacacagacgcaggcagtggacagacctggtgtgtgatcccagctctgctgctttttagctgtgtgtcctttggcaaattacttaacttctctgaggacctgtcacaaagaatgatatcaactgactcccaggactttgaggattaaatgaggataatttttatagcgtttggcacaatgtccattatctaataagcacacatacacagacacacacaaatccagtggctattactacttacttcacaaaatattactttggcaggactgtgctatgaggctggtgatacagaggggatcaacacagtcatggccctctctgtcatctctgagctcacaaggatacctgggctagaaacacgcatacagatttggcaactgtcaacatttggctggaaattaaagccacaggggtagatgcagataccaagagagaacacagcagaagcatagagccctgcaacatctgaaggcagaagtagggggaccatccatgcagcccatggtcagtcgtgtactcctcaaagagcctttctggtaaaagcaacacaaggcagcatttgttcctgagtctaatgtatccctccctcccaccttcccacaccacccaacaccccttctgcagtcagaattaaagacatgaccagcctctgtaagacaatgattcttggggacaactggtttcctgtggttcctgcatacacatttcctgcatgtaaatgcccttcgcttcatgcatccctgcagaatttacccaactttccatgggaaaatacccctcagcagaataatcctccctatttggaaatgtatcatcctgcgttttgctcagaaaaatcttctgccctgtctgccccctccccaccctcgcggagctcagcctgtggtttgctgtgcatactgaaagagtcgatgaagtcatccttcccttctgctgttaaacaaggagtctctttcctgccacgtgttggagtgagagccagcaggcttctcttcttgctcattacacttgacagaatgttaggttgaggatttcccttgctctcatcttctttcgaacaatcaacctacccaggaaaatctgagcgcaacttgtggaatctgagaggcagtaattaatgaggacatcttgttacaaatcagaaggacaggcaacaccaagggctccaacagggacttgtgggagttctcatattccaggctacaaaaacaaatgctgtagacctgggctctgggcagccttactgtggttgatggcaagagtccacggcttttttttttttttttttttttttgctttcgttgagaacttcttcagaaaaccatctgcacttcatttatgtctcaggctgggggtggggggtcggatggaaagcacgggcagagaagtctgctttttcagccctatttttgcccaggaagaagatttttggacagtggaaactcatgtgctgccatgaacacagtaggtgctttagagatcaatatgcgttgttactggtgaacggcagaagtgtatagggattagtggctccattgctggacactgtgcatctgggattgcatctgtggccgtgtgctcatcaattgcataatcagttgctcaatgccactgagcctcagttcctatcctggggatcaagtggagaatagcgtgtggcttttatctttgtgatgaacgtctaaggatggccgttgtgaaatatcattatttttatcctacacctgccttccaactcattttcctggcttcccactccccccatcttctgacaaaaatctcaagcagattccagagcttttctggtggcttttggtcttagaagagaattgcttttgtgaaagcaagtccatttcagtattgagcctcagtctctcatccaggccacatcttttcttctttctcagctcagacctgatgctggaacctgcagagaagctggagggaaggggcttggggctttcctccctccacttctctctccttaacatgcatggctgcttctggcttcaccagtttgctgctgcctggggcgaggtgagggttagaaaagaagggagagggcacttttactttactggggctgttgtggttccctctgttggatgcccttgttatggtgaatgcttccagtgctgggccacccctcctttgtggggagcttctgtgggatctttagatattccccttcccacccactgggcatgtcctgctgcagtcgcccccttggggtggcacactcctgctgaacggtggacctgcacctcagctcgggccctgaactgccctcttggtagctctaacatgcctcatttctgtgacatcaacttggcctcgccaaagtctgagtttcagtcctctcacactgcagcccccttcctctctctgccatgcagcctgttccagccaagcttccacctgtgaattcctccgggccagaatcaggcaccagtctctttgcctgccacccccactaattcaccgtgaccccacccccaacccccaaacctccagtggcacactgtctttgaaatgtgtgggcacggccaggtgtagtggctcatggctgtaatcctagcactttggggagctgaggtggacaggctgcttgaacccgggaattcgagaccaggttgggcaagatggtgaaaccccatctccacaaaaaaaatacaaaaattagccaggcactgtgacatatacctgtagtcccggctactcaggaggctgaggtgggaggatcactggagcccaggaggtggacattgcagtgagccgtgattgtgccaatgcactccagcctgggcgacagaatgggatcctgtctgaaaaaaaaaaaaaaagaagtgtgcaggcacttattacccatggtccaagtcacaagacaacaagaagtgtcccattgactattccattccatctgccgggtgttgagtccagtgcctgaaatgcagtcagttctcagaagaagtgagcttttattattatcaacaatacatgcttttggtgataggaagagccatgaaggagtgggagggcaaaggggtaacacaaagaaaaacccttcataggtaccattctgcttaattcacagtggtgtcacatcccttgggtacaacatgtataatggatgaaagcattgcatagggacatgtatctaactgcgctcatttgtcatttgtatcagaatgtcatattggcacagagcaagcataggcttgcaatcagatgggtctgcgtttgaatcctggctctgccacttcgttgttgggcaaccctggcaaatgactttacctctcagatctggtttccttaccttttgagtgaggagaggaacactgaccttacatggcagctctggggattaattacgaggaataatgcacccagccaatgcctagtgcgtagcagcaactcagtaaataacatttagcatttcatgctattgtgattcttcttcttcttttattcttccagggctcttcaccccctgtttcctcaacttcctgatactaaatgaatgatgactattaaaattaaacattttacatattactagaatttggcttagtggctagaaatatttcttccttttataatcaatatagttgaaagatgcctttcaacctaggcgttattattattatttgagatcgagtcttgctctgtcgcccaggctggagtgcagtggcatggtctcggctcactgcagcctccgcctcccgggttccagcagttctctatctcagcctcccaagaagctgggattagaggagtgcaccgccacacctggctaatttttgtgcttttagtagagaaaggtttcaccatgttggccagactggtctcgaactcctggcctcaagtgatcctcctgccatggcctcccaaagtgttgggattacagatgtgagccaccgtgcccggccagcattattctttatagcagaacagatgaggaagaaaaggaagtcacattcagtaaatcgattgaaaataaaataaacctcaaaattttgactaatccttgctcacataccagacatagtgctcactgctgttcacatctaagaggggtgacgcgctgtcattcccacgttacagacaaggaggcggaggctcaggatgaggagcatttttagggatgcacatcctacagcctgtctgaggtgcctttccaccatatcccaactgcctctcaccacgggcagggagagcctgtgctcaagcaaaacacagaccacaggagaggactgtgtttcctgacttcaaattttggcataaataattgcaggtcttgggttagttacagaaacccattgtcaagagacagctctgcagatcactttctagataactgctgctatgcaagcccaactgggatgtatcttgtgactgaggttcctgtgagcaaaatgtgaggtgaaagctgggtctcttgtggtctgtcctgcctcagcttgttagtgtgcaaagaatgggccgtcctagatgggggttgggggcacaaggggaaatggctggagagagtaattctgctcattgacagtggtgaagacaccacctcctggtgaaggaggaggaaaaacctaaccacctgccccatctcaggtcgcctggcttgactgacaaaccaggccacccatgcacggatggatttgagaaacagtgaccaaacctctccgcatgtgtgacagtgctcctgccacaggagggccccaagatgaatcagcccagtcctgtccttaacaggctcacggcctaagacaagctgcatacaagagtaactgtaacaccaggtcaacgctcaagagaccagcagtgagggacaggtccatttctctgaatgcttagcagaagtgaagctagtctccagctgggtaaggcagggggacaggagagaagactttgtggagcaggtaattttattagaaattcttatgttttactggttcacaagtgagtgtcgtgagcaggatgctggccctgcagtcagtggacttgggtctgagtacaggttctgctcttcctggccgtgggactcaggacaacttgctcagctttctcatctgtgcaaagcagcatggcattgtggggatcagcatggactctggggtcagattgcctgggttcaaatcctgccactctgagctgggtgctggttggcaagtcatttaaagtagtagtgcttcagtttccatatctataagatgggggtcatcatagtatattccaacaaacaattgtgagaatggaatgagttaataaatgtgaaacacttagaacatttagaatagtgcctgtcacatagcaagtgctctatgtgcagctcatattgttgatgttgttaaaagggaggataatattagcgttgctgtaaagatccagaattagggggatcaaagcgtggcacacaataggctgtcaacacaagagagctgctcttcttattattaataagtgcaggtgagcctagaatgagaggtgaagagaagggcatcctgggcagtgtgaacagtaagcaaagagaggaggcaggaatatgcaatctgtgaggcaggaacagaaagtaatttggttcggatccttgggagaaatagaatgagttctttctgctggtttcccagcttccttgggctcttagaatctggtaaaaaaaaagccagcttccctcagcacatctccgtggctttcttttgcaatgtttctgaatacaggcatcctggagggtctgctccctgtctttccaaggatgagtctccaggagatgttccgcttccctatggggctcctgcttggctctgtgctcctggtggcttcggccccagccactctggagcctcccggctgcagcaacaaggagcaacaggtcactgtcagccacacctacaagatcgatgtgcccaagtctgccttggttcaggttgacgctgaccctcagcccctcagtgacgatggggcttcgctcttggccctgggggaggccagggaggaacagaacatcatcttcaggcacaacatccgccttcagacgccacagaaggactgcgagttggcaggcagtgtccaggacctcctggcccgggtgaagaagctggaggaagagatggtggagatgaaggaacagtgtagtgcccagcgctgctgccagggagtcactggtgagctcaccacctggtattcattcaacaaacatttgatgagcacctattatgtgccagggtttccactagcctcatgagcactttgtgactctggtgtgctcctacttctcattctgggttttctctagggggcccatccctgctatttattcatttattcactggtactagctccagggggcatctggaagctgagcagggagggaccagcagctcttgcagagagtctagactcctggcctattgcttccagatgggaatgcttccaggagccgtcatacctgtgaatcaaagcgctactcagagaggaagcaatgggatacacaggaaagatagggccttggagctagacaagacaggttacaaatcccagttctaccactttttagctgtgtgactttgggtaaatcccttatgtttcctcaactgtccaacagggatgattctatcagctagtatagttctgagaactagagatgatgtgtagaagattcctggcccttagaggaatttacaaatcagtaaattataattattttattagtaaaaattacaattataattgtaaaataattacaatttaattttacaaataatgaaggttctcccccaacgcaaccccgtcacttttaaacataaactgcccaggctgatccaatgataatgaacagtactttggcataggatttcatgcctgaaggaattgctatggtaaagagcaccttaaccatcagatccagatacagaactcggcaccagggacactgccatgaataaccagcatggacttgcttctgaggagctcccactttggaagcgtttttaggaaggaaagaaggtgttctgaaaagcagaagctgggccacagaggagactgcactaaccagtctgccctccagctgcctcttgctgtgtagggtcagagaggggagcctggttaaatcccttctccactgtacccatagttgagagtaggctattttgtagcttctgcagttccgttttttccagacttcaatctgggctcatttcacaaggtcccagccttgctagttccagcaaactccaacctccctggatctcactttccccccaggagtcctgccctgcagtgtcagctggccagggtggagcatttaaggcccctccataggaaggcactaaataatgaccaccaggtagagaggaaggaaccggggaattcacacgggaagggaaaggaaagaagggtgggtcctgcagccttttcaggcagagaaagaaggagacgtttgcagatgtcacagattagaaagcctggcccaggctggaaagggccaacaccttttctcccttgtggagctccaccatcctccaaaaaatagccgtgcaagacccagaaatcaccagacccttaagagtggggctaatgatttctgggtcttgcatggctgatctcagaggaaggagatccccacgcacaacccttcaacccaacctactgtttctcctctccctcccagatctaagccgccactgcagcggccacgggaccttctccctggagacctgcagctgccactgcgaagagggcagggagggccccgcctgcgagcggctggcctgccccggggcgtgcagcggccacgggcgttgcgtggacgggcgctgcctgtgccatgagccctacgtgggtgccgactgcggctacccggcctgccctgagaactgcagcggacacggcgagtgcgtgcgcggcgtgtgccagtgccacgaagacttcatgtcggaggactgcagcgagaagcgctgtcccggcgactgcagcggccacggcttctgtgacacgggcgagtgctactgcgaggagggcttcacaggcctggactgtgcccagggtgagagcggagatgtgccctcgggccgccggactcttctttccaatgcaccatttaaccctcaattacacgttgtcatctttgggggtctcttcctttagcctacgccagattgctgagtcccaaccccagagtttctgattctgcgatggggcctaagaatttgcatttctaacaagttcccaggtgatgctgatgctgctggttagaggccctaaccttgaggaccactggtcttgtgatctaatggctgtgtgtgagtgtgtgtgtgtgtgtgtggtgagggggtcagtattaattacctgtcgttcggataataacttctaggggtcgggaatggcgccttacacaggtctgcatcctgcacacccacccttatagtgctcagggaatactcactgggtctggatcgcctcccttgctcaccctctctgccctgttcctgttctgcctgcagtggtcaccccacagggcctgcagctgctcaagaacacggaggattctctgctggtgagctgggagccctccagccaggtggatcactacctcctcagctactaccccctggggaaggagctctctgggaagcagatccaagtgcccaaggagcagcacagctatgagattcttggtttgctgcctggaaccaagtacatagtcaccctgcgtaacgtcaagaatgaagtttctagcagcccacagcatctacttgccaccacaggtgaggaagccacctgatgccccagggttcccaggagaggccccattctaaatggtttctttcattaaacacctgtaggcagttgccttgattaggggtttgaaaaacacacctgccacaatcctaggttctgaagagtcccagttctctctcttctttccttgctccctgattactgggttctccaagcccatgaagacctgctagatgggggctcatggggtcttctctgtccctgagattatttgggtctgcaccttctcataagcagtcaaagtgtagacatgaatccccagtctcttactgaacccccaaagccattcagaaagttcagataggtatgggtgagaggctgctgaagccacctgtatcagttagattcatcttggtgggaaagacaggacacaaatggggtaaatgaaatttcaaagtttaactaacagattgttcacaaaggtgtgggtaggggttggatggtgacacactaagacctgcatcaataaggatactctcctgcctgaaggggcaagggatagatgttggtacttggacccagagagagctgtagaaaagagctgcctggtagggttgttttggtagagggatgcaggcagtccaccgtgtctccaaagaattctgtctcctgccctctgatctgctggtgattcctgctagctgaacctggaagccaaagggtcaggtaaacaggcagactcaattcacagagatcacagcctggggtacagaacaagatggaggatggtggaggcttgatctggagaaacagaatctcctgtgcaccagcaaatgccaccaaaatgtttagaaggattagcatcactgcttactctttaaacattcttgtctcctcgtgaacattcttaaagcagcttagatcttcaaggatttggagaaacgtagttggttgaatgactaactcattccttcacacagtacatttttattgagcacttaccatttgtcaggcactgttctcggtgctaaaaatgcactgcctccatcctgccctaaacttctagggaaagatctaggaagatacagatggatggaactttggcatgcagttgtctttgcagagacatcaagctgcctgtcctttatggtggtgggactagggtggaggtggggatgggtcagtgttggaaagggctgtgagagacttggccatcatgaggtcaccatatgtgattacctttgtcagtgccctcaagctaaagacccccaggagcacccctgtagttgaacaacttgggtgtcttgattgttctagcatgggtgactgcacactatgggggaccatagaggtatctcagtaagacagcgttagaaaggactggttagagaatctgggcctgtgttaggtaatttgggggaaggtgtaaggaagcagggattgggtgctgtcaagaagtggggagagcctctcccctctgagaggctgaagttggtgattgtaacagaagtggccatcactcatagtagtcaggagagtgggtgttcagctatttgtgtggtttggacaatggtcatgtttttgtctgtgttcagagttgatcatggaagtgtcttgtttttgtcttgatctatgcggtcacagagtgacctgacattgatgtcctgtgaaatggtttatgttcaataggagacaccaagtcctcactgtgggagccaggcccattctggctggcagagtctgcttttctctttttccccattttgtctgtggctgcctctggtacagctagcactgtgtccaaagcctcccagtgcagcacagagatgcctattctgaaagtcctagcaacccctcatccatcttgctctcgggatttgtaaaattctgcaagtgtgaagtttctctttctttctaatctgattcaggttaaacacattcttatttgctcctcaggggagcctaagacaagaggtactcatccccaccataatcgtgaacattctcattaagtccttgctttttcatttgtgattccctcccaattcttttacaccatgtaggaactcttatataagcctcaagtcacatttattactcacctcttgacctggccttcagggaattccatctttaatgggagtctaaaaacagcacctggcagatggaagccagtgggtgagaggaaaagcttcagagaaaaggctctgtgaggctctttatccataactgattgaatcggggacgttcagagcccagggaccttgagatcactgagttcacacctggcctgacactaattctcgatccttcatcatccgtcagtggtcagtaggcctgggtggagacacctccagggaggtgaaggtgggggcgtgactgatgaagaggggaagcctgagaattggagggccttggctttcctgtcaaaaacttagaaggccaggctccctcagcctgggatatggctgttggaatttgaagtgcttctcaaagaccctagtcctcccatccctagaaaagttctccccttagagctgtagcaatgatccattcctttgtattaatcactgtaacttcatgtttttttttttttctgagtagaagagtaaacatttagccgttaatactttactatgaataaatgtatacaataactctcttccttcacaggacagacagattgggcagcatgagaataccaggtaccagatggaagtgctaaaattggtaaaaatagcaggaagtacactcagatggaccaagttaaaattcacctactttatagttttgcctagggttcatccttagaggagaatttgagaggcaagggctgcaatttgggagatggagaaaggagcttgttggattaccaatgttgtccttgagaaagtttgaaatagattctctccactttccgtggaagtgcctgagctgcttatcctgaggtcgtcttagagggcaggggctctgcagctgaagagtgggcctttagttcagggctgtagctgtcagagctctggactgagtggtttgggtggccaacctgagaggtacagtttgggcttggccaaagtcagtgtggacagggaagaccacatggcctctgatgggatggggaagtggaggctttcccaaaagacagtctgcccatggaatatgtgaaaaccagcagcttagttgctactttggtagctcaaagacacctgctaagaactgtgtcctggggctgaagccagctcttgagatgtcaagaaagggagctgacctgataaccaacagcctgtcacagaaccttggaacctctgctcttcaccactttctcttgcctccgtcacccctgccctagaccttgctgtgcttggcactgcctgggtgacagatgagactgagaactcccttgacgtggagtgggaaaacccctcaactgaggtggactactacaagctgcgatatggccccatgacaggacaggaggtagctgaggtcactgtgcccaagagcagtgaccccaagagccgatatgacatcactggtaagagccatcactggaatgtgagatgtatgctgtggatgcagaggtggggatagtgtgtgcagagggcactggcatctgcactgctcaagtgtgcacagacagcccaggggccttaggaatcacacttgaatctgacccttgaatctgccagacataagcccacctgggaggcctgtagactctgccccagcattccagagctcgatcccagggcaccttgttaacagattatatttgtgagatgttctccaagtcagcaaactctcttgaagaccctgtctgtgtctcagaatggatttgatggtgtatagatattccttttggaggaactttagtatttgggtgttggggacaggagggaacagaaagagagagagagagattgagattggtttgttgagcatgatgcatggaaggggttgtgttgggggatgtggaggggggcagggtgcagtgagcaggggtggctctctgtctctgatttctgagctaatgctgccaagagctagagctcaaatggctgctaaggaaacaaggctgcagggatggatcaagtttggcagtgcttgaagtctgtacaattccagggctcttttttaagaaaagtaatacgcaatcatgaatacccaatcaggtacaaggccttggaatgggcccgtgaaagtgtggggcttattagcttcatggtaaattccctcctggagccttgttctgctgtccactccttgagttctgtcttgacaggacattttggggttcttagtgtttgtggagtgcagaatgagggtgtgtgcctcacacaagcttctgtttgtctgcattttaccaccacagtctgaatatttgtgcccaaggaaaaataattctagttgcttctacagagaaataacttttttttaaaaaaagggctgggcataatggctcatgcctgtggtcccagctacttaagaggctgaggcgggaggatcccttgagcccaggaggttgaggctaccatgagccgtgattgcaccactgcactctagcctgagtgacacagtgagatcctgtctctaataaaataaataggaaaaaattaggctaaatgtcacaatgagaaggagagatgctttggaaggaaaagggttgctgggagcagaaacacatttgggtctataaataaaattgggaaataagtgctaggtggcccagtgaagaaccagagaacatttgaaatgcatttcaattgctgtcatctcatttgctgtgatgccctactcccatccccagcctataagccccctcagtgacacctcatgttctattgcacctgcggggctttatttgcctgcaaatacagattcatctttggaggaggaagcatcacctctcatcttccctcacgggagaaatcccagggaggagtagtgctggggagaggggtctggagcctgcactcacatcctgcgctgcctgcttgtttccaggtctgcacccggggactgagtataagatcacggtggtgcccatgagaggagagctggagggcaagccgatcctcctgaatggcaggacaggtgagagctacttggaggcactatgggcatttaatcatgtttgcattctcatatttttcttggctgactcctctctggataagaattctgggatttgcagacagacggggtggctcacgcctgtaatcccagcactttgggaggccaaggcaggcggatcacctgatgtcgggagttcgagaccagcctgaccaacatggagaaaccctgtctctactaaaaatacaaaataagctgggcgtggtggcgcatgcctgtaatcccagctactcgggagactgaggcaagagaattgcttgagcccgggaggtggaggttgtggtgagccgagatcgtgccattgcactccagcctgggcaacaagagtgaaactccatctcaaaaaaaaaaaaaaaaaaaagagaattctgggatttacatgtagagagagtctatccctttatgtactgatgtctatttttgggcagggaaagggaagcaaacttttcctatttcaaatttttcttgccattgaaaatctctcccagggtcttggagtcaagggacaagactgtctgacaccgttctgcttattttaatagcttctatcaccgcgttgtttttaaggcatttattatctaggacataggcacatagctccttattccctaaagacaagtgatctataattttcttcttgccacacctgtgttttttcctgatgcccacattcagtagactcctctaaaatgtcaaaagatattaaaaaccctcacatgggagtagtggtatgttgtcatctgtgtattgagaaaatatataatgataaaaggttacaaatcagtcatatttgacaataagtttgtaatttattaatcagaacagaattggaaaacatggtaggcatacatacgagacatcctaggtaacttttagtttttaaaccatgcttgagcccatattgaattgtgaacttcctcattaactctgtgctcctgccttccccatgctggaaacctgtgatctagaacatagtgccactcggggagactaatccttggagctggtaaagaaggagtctttgagttttgagtcttcgttgaaaagttttttagttctttccaattcagtcctggaaatagctggttatggtggtgagaataagaggtgagatgttgtgagaattgaattcactatttcagctgcctaacagattgcttatctgcagtatgaaacagttatagttgggcatttataatggagaacatataacttaatttacaaactagacaaggtagactgtacagtctgcctgaatagtggactagggaactgttttaatgggttagaaaatggtaagtacttctgtgcttccagtggcattccctgtagctgtgaattaattgagagcttactgagtgccaggcattataatcactaagcactttttatgaatatctcatttagttctcacagcaatccaatgaagtagatactattattatttctctgccacatataagaaaactggagaagttaagctcaagattgcccagccaggaaaggacagagctgggatttgaacccaggatacccaagtctaaacctttgggcttagctactgcaaaccaaaaagtatctgagataggccttaatcaacttagaagtttatttttccaaggttaaggacatgcctgggagaaagaaacatggaatcacagaaacaatctgtggtctgtacctttctccaaagatgattttgaggacttcaatatttaaatgggaaaagtgggctgaagaggaaatagggagggtataattcccatgttggaagagaaaggagcaggtagcgggatagtcaattacgtgttgagtacatttgcacttttctcaggataaggtgaacatggagtagctacctgtggagatatttaaccttttatccggcgtaggaacaaaaggaaaggcagcttcttgcataactcagctttcagctttattttttccttttggcagagtgaattggggtcccgagttttttattttcatttcaaactacaaagctaaagtgcttcccacttttaccttcctgtaagagataaacactttttcttctcttacacagtcaacacaacacagaacatttcacctctggaagtgatttttccccatacaccagggagttttccatcggacacaaactggatgttctataattcaattcatatctgacattgtctccctggaaatagcctcagatcccacaagttaaaggcccagtcccacaagactttcctcacttcagatgcctgtcacagtccccgggttaggacctgtacttctgaccaatcagctagaaattgggggttcttatgactcccctccttgagttccattaatttgctagagcagctcacagaacgcagggaaacactttacttacgtttacctatttagtataataaagaatattacaaagatccaggtgaagaaccagatggaagagatgcataggtcaaggtacgtgcttccatggcctctgtgggtgtgccaccctccccaaacctccacttgttcagcaaccaggaagcactctgaacccagtccttttgggttctcatggagacctcattatataggaatgattgattacatcattggccactggtgattaactcaacctttagcaactgtgagcgcctctctccttccccttgttaggggggtgggtaggtggggctggtagttccaatcctctaatcacaatgttggttccctggaaaccaccccctttctgaggctacccaggagcacccctcaaccccttacagcagtcatctcattaacatacagaagacacctcactttggagattccaagggttttaggagctgtgtgccaggaatcagggacccaaaaccaaacatgtgtttcttgttataaatcataacatcacacctcccctccttcttgcccattatttctggttaattttcatactgtttgcttcctaactgaaaaattttctatgattcctcactgactgaggaggaagcataatgcttttatcttggcctccgtggcccacccagcctgggccactgttattctcattacttccccagggaaagccttcctgtagccagactgtttgtggggtttcctaacagaaagcttatctctgcaagtgggtttctgttgttacttagcctggaaaacccttgccattatttctagccacaaattaatttaattcaacaaacatttattgcaggatgtatctgggccaaagagacctggtccctttagaaatttccagagctgataagccatggtccttttccttcaggggatcacagcaataatgtgacgtatccttccaggctgtgctcaaacagtttctccactgcagccttctatgaccgcattaaatgtcagccagatttgtttctgaggtctgagagcatttaatcacatatggccttgaattgctagttagccttccacctatactggaatgttgttactcaaaagtgtttttattgtcaattatatcctaaaaccaggatagaatattttattggattgcaaataaatttgtgtcatgtgttttaccagcatcaaaaagaaaaagacactgtaatttatagggtcaggaaacactcttaaacctggctagactgttaattaatttaagggaaaagaagaatctctgttttctccaaacgttttgcatcccaccaggtggaaaaggatgctggaacttaagaacagcctaagcatgtgcaggaggaaacgaggaaatgacaccgttcagggatttttcatgtaacgaggcacccagtgtaactaacaccatgacagggaaatggttgactgaaattcctcaccctgttacccaacatgctcaaagtgcgctggaacaccttccagaaaggccagcctcagaagcaggtcagcttaaggagcagcaagcatacgccaggccagtgtctctgggggattggcgaggggaatgtccctggacttctgcatcataccctgacagctatgcttcccattcaatgaaaagaaagggaggctactaactgagaggtgatgtcattcttttgtcctctatctataaaatgaagagttggactaaatgagtttaaagtcctttctcttttcttatgatgatggtattctgttaatagcttcatgcttttccctggtgtgtataaaacaaagcatgcttgctttgttataatttcacaagctcccatgcacagcaaaggttatagcctagaatattcacttgtcatcaattttctcagaactttcctccttagactatgctgtgaaatagcagttttgcttttcttaatatctttttcactttttactgatttccaaacacaatgttccatttgaaatggcttagcccctaaaactttggaaactccttcatgtcctaggctgagctcctgtcaccattgagaactcctgtctcatacacagccaccaacacacacatttagcatctggacaacagcaacaatctctatcatttgcgcgatcactgtattctagtgggcttctgtatattgtgagactttgtaaatattatctctggtccttataatatcaataggattgtaagcattattatttccattttacatatgagaacactgaggcctacaaagtttaggagactcagggtgagctagtgaacagctagctggtacaacttaggttcgcttgaaatcaaagtcaataacctttttagaagcaaagctggaggacaacaggaagaagggctgacctctctgagtgcattttctacaaacgatgccttttggataattttgttgccacaattgaaagacattagaggaggtctgtgaaaacaagagtacagaacgtgtaggtattgtggtctcaaggcacctcttccaggaacccaccttcaaatcaatgacacaggtcctgccccccgtgtcttcctcccccaagatcatttctcatagatttttcatcccgtcagtgccatcttctactgcaccaactgggagattcacaggtggaaattgtgagtggagaaacctgttcctaatgcctgtgactatgtgctcaagtgtggacaggagctttcggatgttacagcctagtgtgaagacagatgttccctacccaactctgtggcaaatcttgttataaagtggaataagctttcctgatgtgaacagagcttctaattaacctcctccatatactgtgttcaggttttgcaaattagatctctttgaagtgaagtgcacctttattctaactaacgtatgtactcacaggcgagtcccacctatccagttttacaaaccttactttacatctcattgaccttgaatgtccctaagaaaggtcccaccagggctgctagtgtccagcagttgggaagttccagcctggggaggatgttggggccagggtggggagagcctgtcttgtagtagaggctacagctgtggctaatctgtgatttagccagctgctgcagctgctgaaaggcttccttgcatggaaaaactatttcataatctccagatccctttttggtagaaagaggtttcagtcctgcaaagctggcctcttccagcaatgtggcctatcatggaggtcccatctctgaggccttcctcccattcctgtgtctcagcacctgatccccatcgggggaatggtcaaggagagcaagctctgtgaagagccccttctgagttgagttgctgtggttagagaactgagagaaaagggaaggcagggggccaagagctgtgactggcactgtgagcttggagaagtcacatctcctctcttaaacttctttaaacctccaggtctcctataaccctggtcataatatgattcagttttaccttcctactcttcatacccaagatgctgtttcctggttcttctccatcccttgagtgctctgggactggtgggagagaaaggagctacagagctggctgctgcttcctctttccacccatgtggacatgatggatctttcctttatttatttacttttatttatttattatttttatttatttatttatttatttatttatttatttatttattttgagactgagtcttgctatgtcacctaggctggagtgtggtgcatgatctcggcttactgcaacctctgccttccaagttcaagccattctcgtgcctcagcctcccgagtagctgggattacaggcatgtaccaccctgcccggctaattttttgtgtttttagtagagacagggttttgccatgttggccaggctagtctcgaactcctggcctcaagtgatccacccagcttcacctcccaaagtgctggaattacaggtatgagctgttgtgcctggctatgatatatttttcaatacacacaggcagcaccaaccccacaaagccacaggcctctgctgtgggtcctggaagcaatggtagcaagcaccaatctggggcagggagatggggtgggaggcactgctgggacctggggttgtacagatgtggatgcttttgagaaggtgagggccatgaacttcacgagcaggactgctagggtgttcttgctcgcttcttcctgcctccttagttttccatttccactttgtcactaatttccccagattgagatattggttttggatggctcttgtcatctcttccctatgacatgcaggatcatgtcttgcacagaaagttgtaacaggatggggagagagttctctctatcgttgcactcttttccttgactgtcctcttacagcctgctggagcctccagaggccctggccatggggtcagacagtgggtgcctgcatcctaattgtccactctgtcattcctggaggcccacaagtggcagactattgtgagactattggctctgagctcacagtgccagtcacagtgagactattgtctcacaaggcaatagttcaagaacgagtttctctctctagttactgtctattactgctgctggatttcatgtcacagtaacctttcagttcacactttactttatttataatttattattattattagttgcaaaggaaaatgctattgatagtgctgcttaggacatagacatataaagtggaaatgtatagtctttgttagataagaatgagttcaaatcttggctctaccacttaatgtatccaaaagcaaacgcttggtcctcttcctctccccactccctactgcaaatgcttccctccctcagatatccctgtctctataaatggccactccattttgcaaattacttgggccccaagccaacaaatcattcattgtatcccatgttgaatccatcagcagattatgacagccttacctttgaaagctccaaagccagccttccccatgaccctcattactgctgcagtggcctgcacccccaccatcttgcatatacaccactgaagcagcctcctgggtgaccttcactcttggttcactagagtgagtattctcctcagaagccagagggatcctttgatagcccaagtcagatcaggtcattcttcttttcaaagcccccagagacttctcttgttacttagtgtaaaagacaatgtcattacaatggccttcaaggccatccatagtccactgtccctctcacttccctggcctcccctccagccgcttgacttaactctgtctagatgcactggcctccttgctgttgcttgaacacatgaagcaggaccttgggttagcagggacatgtgtcaaagaaaaaatgagagattttctaaggtcatgggctcaggatatgttcttgggaagcacagtctctaggacacagctggcatattgttctgggttatttctttttgaatataagctccacattggtggggatttctgactgttttgctcattggtaactcttaaatgtcattacattccctgacacataatggatgttcagtgaagtgctgttgaatgaatgaagtgagttttggagatttgtatttgaaaagagagagaggagcatgtgtagataaaagtgccaggtctggaaactgtgatttggaagcaatgaacaggggaggtgatgttgttttgatttgaggagaactagggaggggaatgatgactcttcttgaatacttgctggttggtcttctggaaggggaattagatgtattctctctgtctacctagggtagacaattagaaggagttacatttgaaggagttttctctaatatgttcagtagtctgcaaatggaaaatggaatggattgtgttgtctattggagagtcctttcttagtttagggttcaagcagaagccagttgtccacttgtcactgatgatggagagacccccttgtattgcataaactattgaactaggtcacccaggtgaactagatctttaacaatctatgatcttgactaaccaactggtttctctgatttttctttctcatgtgtttttatgaagaaattgacagtccaaccaatgttgtcactgatcgagtgactgaagacacagcaactgtctcctgggacccagtgcaggctgtcatagacaagtatgtagtgcgctacacttctgctgatggggacaccaaggaaatggcagtgcacaaggatgagagcagcactgtcctgacgggcctgaagccaggagaggcatacaaggtctacgtgtgggctgaaaggggcaaccaggggagcaagaaagctgacaccaatgccctcacaggtaacagaaggacgggagcataaataggtttcctcatggcagggagaaggttgatttttgaatcaggaggtcattgctcacctggcatcagctcttttgtttgcaggagtggggaggaggttgcaaaaccaattttgattttcataattatatatatttttcctttttaacatcaaacaaaagagatcagctttttcacttgatgcagaaggtcatacttatttgagttggaattccgtatgcaaccccctcagaatagagtaacacttcctaattttcattttttagatgtgaaaactcaaaacattgggctgacagtgaatttgaatgcttatctcagtttgcagtggctgtgcaggcactttgcatataatctggagctctcttttagaccgtggaaatagtttgcatcctaagtcaacatttactaaatggaccaattcttcctttaagctttcagaagccatgagggttctcatacttcacccagtcattctgctcagtttgcgcctgcaggggtcctgggactatactgggacatagcccagccattctttctgcttaaatcctctcctggtgcttctctgaatttagagcagcctgatcctggtgcccgcatgaggttccaaaacacctggcaggaaatcagagggaaaggcttcgcttattgtttgcattctattctggacagttactgagtatagagactctcagagaagcagagagatggttaggaatatggtttcagaaaattgactgtccaggttttaaccccagctctgccattgactagctgagtggctttgagcaagttactttacttccgttcctgtttcttatggcacaagtgagagcaatgattttttagaatgttaatcagtatttggctcttgaaagatttcgtggtgcacagcctcctagatccatgtgggcctcaatagttgacctcttcttcaggggagcagagaagatattgacagtaaggatggtgatatctaaatctgtttaaagtcaaagtcagcaaatttctgtaaaggaccagatagtaaatatttttggctttgggggtccaacagtttctattgcaattacttaactctgccattggagcatgaaaacagccacagacaatgatgtgtaaatggactggtgtgactgtgttccgataagactttattgataaagattgacagtggatcagatttggcctgtgggttgtagattgcccctcctggtttacattacacgtgactctctgtttactaggattttgagtgtcgtgaaaagaaagagcatttgggtcagcatttttgtttgtttgtttgttttgttttgtttgagacagagtctcgctctcttgcccaggctggagtgcaatggcgcaatctgggctcactgcaacctccatctcccgggttcaagcgattctcctgcctcagcctcccaagtagctgggatttcaggcacccgccaccacgcccagctaatttttgtatttttaatagagacgggttttcactgtgttccccaggctggtctcgaactcctgagctcaagcaatccaccctcctcggcctcccaaagtgctgggaaatacaggcgtgagccaccacgcccggcccatttttaaaacaaaggaagttggaatagagaagaaccttcccttttcttaggcggtggtggtgtgagcagcagggagcctctggagggtggcattgccactgggaaggggtcagaccagagctgagctctgggggcacaaacatgaaggaagtgattcacgcctgtatggcattcacaatcctctgggtagagaagacaagttaaaaagataaaggacagtgagttatgttctagagcaaacaaatgtccctggagctatgggaaactgaagaaaggggacctaccacagactaggacaggataggggtcatgcaggctgtgggaggaggtgacacctgaacaaagcctggaaggacgggtgggagttagcagtggaggcagcatatgcagaggctaagttgtgagaatatgacaggttaggtcatctcaaggggttttaatggagggccggtctgtgtgtttggtgcactagtgaaggataagccagctcagaatcctgggtgctaaatcatttgtcctcatgtcagatgtctgtggtgcatgctgaactttgctccctagggtgagtcactgcatgtggctgtgcattccaccatgctggcctgtcccccttggcaagtggtcctgtgcaggtatgaaatgcaggtgctgtcacaaaaagtacagccttttttgaggaggtagtttctaaaagaggataataaagtcatgctaaccatacacacaattgcttggatttttgactccctaaggatgtacattttgaggagaaagtggtatttcatgcctcaaatgccattaataataacaacttatatttaagcatttgctatgcaatatctcatttactatcaccataacctatgaggtaggtagtggtatttctttcttcatagagttgaggagacagacacttaaattacacggcttgtccaaagttagccaccaggaagagatggagcccaggttctaacccactttaatcacagagaaacccagacagattctacaagtttgattctttttattagaccagacctcagatactatcaattaaaaagtctcctggttccctggccacagatgtaatgttttatatggaaagaactgatggctactacttctaggatatttttcttctcaaagaacatattagagcagatgcagaggtttattcagtataattgctttctagtacaaggagtcaggaactagaagaatatgttatataaatccagggtaaaggagaaatttgaatgtgaagaccaattatttttatcccaaagcgacttccgggaaaagtttatagagttgataaagatgctggctttgtctgaaaactccacttcttattaaatgttattagcttattactggaatttcagaccatttgcttaattagacctttacattaactcaatcattgacatattagagactctgacatttgttgaggttatcactttgactgtgttcgtgctgtctttatggaattagagggtggtaaaggctacattcttctttcatctctctcttaaagaaattgacagcccagcaaacctggtgactgaccgggtgactgagaataccgccaccatctcctgggacccggtacaggccaccattgacaagtacgtggtgcgctacacctctgctgacgaccaagagaccagagaggttctggtggggaaggagcagagcagcactgtcctgacaggcctgaggccaggtgtggagtacacagtgcatgtctgggcccagaagggggaccgagagagcaagaaggctgacaccaacgccccgacaggtaacaaaagagagatggtcaattggaattgagttttagcttgtggatttgaataggtatggtatcaaaggatgtggcctgagcagaaagactttgcaattagaagtcttaaagatgaaagaaagactgagctctcgtggtgatggcggtgggctgctctttcctgacagtgatgagctgttcatgagaccacttggcccactgaaagagagaagtaaagtcttatagtaacaatgcttttagcagaagatgggtacaggatctggtcattgcagtgcttgtgataatatttttagagtgctcatcagtgaagtagcccttgataaaatgttatgttaggaaccctaaatgtcatggcagctgtttaattggaggttgtgatgtgccatatgctgctgagaagacatcgttcctccaacattttagggaactgaaagccaagaaagaatgcctcatttataatgattcctcctttgaagttcagaaccaagggctactttctccttagactcccagcggagactcaggatgagaatgccattgccttgttctaaaagagctctggaagatgaaaatgatgaagatgggggtaaggatatgtcttccatggcttcagagcttaaacctttccaaacattttccttccagatattgacagccccaaaaacctggtgactgaccgggtgacagagaatatggccacggtctcctgggacccggtgcaggccgccattgacaagtacgtggtgcgctacacctctgctggtggagagaccagggaggttccggtggggaaggagcagagcagcacagtcctgacaggcctgagaccgggtatggagtacatggtgcacgtgtgggcccagaagggggaccaggagagcaagaaggccgacaccaaggcccagacaggtaaggagtgtgcattattgctgtgccgatgccatgctcagggtctgtctacatggggttttcttctctgaccttggcataaagggggactttatggaagagcaggttggtatcctcccataatacattgtgtccccctcacttccttttactggcctctcttagaatgcctaagtggtggtctccaaactctggtctttaaagatggctgatcactgcacatagttctttgttctttctttgcctgagtacctttgtcattaacacactaactgcttctccttgacaaggagtaaatattaagaagtaactatcatgctgagggagccagacttagggattgtgatcaatcccttaaaaaaaattcctcacctgtttaaaccctttgcaagcttgtttgtttttgttcctgccatctgaatgaatgttttaggcagaaataataacagtgtttccattagctaaaaataaaatatctagtcatttttagtcccccagatgtaattatgtctattttcatgtaatagtccctacttccctacatgaaatcttctcctctctctcgacttgggccacctgtgggccagctgcctgctccaggcaggggacatgcacaatttctcttgtattttctgctgtgtacctcaagcactgctcttctagcttgctgtatgcagtttctcacccatttatctttggcgttgctgggagaggtaaactgatgagaggtgaggggtgaggacgggcagaagtgaagggtcaggaaggaggagaggtgaagggtcaaggggaaggagaggtgaggggtcaggaggagaagaggtaaggggtcagaggaggagaagtgaggggtcagtaaggaggaaaggtgaggggtcaggaagaggagagatgaggcatcaggaggaggacaagtgaggggttgggaagaggagaggtgaggcgtcagtaagaggagaggtaagggtcctggaagaggagagatgagggctcaggaggaggagaggtgaggggtcaggaggaggagaggtgaggggtcaggaggaggagaggtgaggggtcaggaggaagcgaagtgaagggtcaagagagaatagagcccaggggttagggaggagggagctgggggtcgtggaaagtcatgcttgactgtaacaggtgtttgggcctgccctggagcctgacgagtgctaaagctgactcggtcatgaagcacttctgtgctcctcttctacttgggtctctcactgtaggcaaatgcctgtcttccactggtctcttactccccttcctctgccaatacatcaggggttcccccagcgcctctctggtggggttgccttgcccctctaggtggtcctcttggacagcttcccaggcctaccttgctgtgctaggcccaagtctggtccatggagaacctgcatgcatcctttgtccattcaaccagatgcacagctcttttgcaatgctacagcctgtctttgctctgtgtcagagcaaccagctattttcttatctcttagatattttagcatatgtcagacaccagcccgtatgattccccaagctttgggctttctcacccttggcactattgctatcttggggtggataattctttgctgcagaggtctatcttgtgcattgtaagatgtttagcagcatccctgatgtctccccctatcccacactgagttgtgacaaccaaaagtgtctccagacattgctgactgcccctggttgagaactgctgctctagggtatgcaaaacaaagtctgtaagggattccattgaaaactgcttattcaaggcttgggcctcacccatgggactcacagtgtatctttttccaaataaatcccttcttcaagtcccacctcactggcttctccaatgtcttttatagggcgaaaatgattggtcagccaagggtcacaaaactgttgttgatcttgccttgactgtggttcctcaggttggaatgtagatatccattttcttggggttacagcctaaagcaacatgtgtaataggacgtatgagcaagtgactttgggaaaacggcttttgcaatgaattatttaggacaaagaaatgctagtttttttttttggtgaatgtatttttaagtatcttctatgtatgtggtatggaggaacataatttcttgtatttataatgtatcaacaaactggtgttaataatgatagcttatggtcattgggcatctactcagtgctaagaactcataatagacatttgtttcttttttaaaaaaattgatacataataatatacatatttataggtacatgtgatgttctaatacatgcatgcaatgtgtgatgatcaaatcagggtaatcaggatatccatcagctcaacatttggcatttctttgagttagaaacatgtcaaatcttctcttctagctattttgaaatgtacaataaatcattgttaactgtagtcatcctgtgtccggaattggtgggttcttggtctcactgacttcaagaatgaagctgcggaccctcgcggtgagtgttacagctcttaaggtggcgcatctggagtctgtcccttgtgatgttcagatgtgttcggagtttcttccttctggtgggttcgtggtctctggtctcgctggatcaggagtgaagctgcagaccttcgcggtgagtgttacagctcttaaggcagcgcgtctggagttgttggttcctcccggtgggctcgtggtctcgctgggctcaggagtgaagctgcagatcttcgcggtgttacagctcataaaaccagcgtggacccaaagagtgagcagtagcaagatttattgcaaagagcgaaagaacaaagcttccacagtgtggaaggggacccgagaaggttgccaatgctggctcgggcagcctgcttttattgtcttttctggccccacccacatcctgctgattggtagagccgagtggcctgttttgtcagggcgctgattggtgcgtttacaatccctgagctagatacaaaggttctccacgtccccatcagattagttagatacagagtttctacacacaggttctccagggccccaccagagcagctagatacagagtgtcgattggtgcactcacaaaccttgagctaaacacagggtgctgattggggtatttacaatccctgagctagacataaaggttcaccaaggccccaccagagcagctagatacacagtgtcgattggtgcactcacaaaccttgagctaaacagagggtgctgattggtgtatttacaaaccttgagctagatacagagtgccgattggtgtatttacaatccttgagctagacataaaggttctccacatcctcaccagagcagctagatacggagtgttgattggtgcactcacaaaccttgagctaaacacagggtgctggttggggtatttacaatccctgagctagacataaaggttctccaaggccccaccagagcagctagatacagagtgttgattggtgcactcacaaaccttgagctagacacagggtgctgattggtgtgtttacaatccctgagctagatataaagactctccacgtccccaccagactcaggagcccagctggcttcacccagtggatcccgcactggggctgcaggtggagctgtctgccagtcccgcgccatgaacttgtactcctcagcccttgggtagtcgacgggactgggtgccatggagcaggggatggtattcgtcggggaggctcgggctgcacaggaacccacagaggttggggaaggcttaggcatggcgggctgcaggtcccgagtcctgcccggcgggaaggcagctaaggctcggcgagaaatcgagcgcagtgccggtgggctggcactgctgggggacccagtacaccctccgcagctgctggcccgggtgctaagcccctcactgcccggggccagcagggctggccggctgctctgagtgcggggccctccaagcccatgcccacctagaactccagctggcccgcaagcaccatgcgcagccctggttcccactcgcgcctctccctccacacctccccgcaagctgagggagtgggctccagccttggccagcccagaaaggggctcccacagtgtagtggtggactgaagggctcctcaaatgctgccaaagtgggagcccaggcagaggaggtgccaagagcaagtgagggctctgaggactgccagcatgctgtcacctctcaatcccccctctaaacaggacaccccaactgctgttggcaatttggccgatgaccactctagctacttcctgctggatggggcaaagaaggggccctgcagttgcggtgtccttcagaggggaactctctaggccaggggaagtgccagtgggttgatccaggggtcctcggtagaagttgttagttgaactcttttggggttccatttgtaagaccatctgtagcttgatggcctcgattctagaggaaacaaatttgacaagaaggttaaaaatacagggcccaaaggcgagtaacagcaagatggctgccacaggacctagaaaggggagaagccatgttgcctaactccagaagttggtataagaatttgaaaggcgttgtctgatttcagaagccttttcctgtaaactccgggcagcatctcatactatccccgactggttagtgtaaaaacaacattcttcccctaagaaggtgtagtgtcctcctttttcagcagtgaggaggtctaggcctctgcagttttggagagtcactgctgccaaagagtctatttgggattgtaaagtaaggatagatttcattatttcttgcaaactgtctgagaggcagatatgggttgaagatccacataagtagaatatgccttggctgggtagatagaaatttaccctggcttttaaaggaatgggatatgctgtttttttctttactacttctatctctctctttctctcttcgacttcttctttgtcttttcctttcttcttaactttttttttgactttctgtgtctgtccctctttctgactccttttttttgtctctgtttctgactacctctttgactttctgtctctttgtctcttcctctctctgtctctttctctgactttctctttctctcttttcttcttgctggtctttccctacctctgccagccgcttatgctgctgttctcctctctccttcccattttgatggctttgtcagtgtaagattcctacctctttgtgtttttttgcattacgtgactgtgcgggcatttttttgcccttctaaattgtccttccaatgcccagacttcagtgttgattccctcctcaagtaggggacaacaaatgggtaacttgttccccatatttatgtagataatagctccagccttggctaatatatccctccctaataagggtgtgggactttcagacataacaagaaagccatgtgaaaagagcaaagtctcccaattacaactgaggaggtgggagaaatacctgattacaggctgtcccaggattcctcggatggtaacagaccttgaggacagttgtctaggacaggagattaacactgagaaggccgcgccagtatccaggaggaagtcaatttcctggccctcaatagttaaacatacccagggctcagtgagggtgatgacatgagctggtgcttgccccgggcaccctcagtcctgttgttggatcatctggttgggggcttctaacccagggaaccttcatcctctggggcagtgcaccttccagtgattgcctcggcatagtggacacggatgagggggcagcttgtttcttattggacaatcttttttaaagtgtcctagtaaaccgcactgataacaagccgtaccaggtgattggcctgctccattttctgacctctctgaaccaccaaggtttgtttgtctgagggccatgactaaggctgcggcctttctctgatctcgcttttccttttgggcctgttcctcttggtccctattatagaacaccaaggttgccaggtttaataatgtctctagattttgttcagggctcagggcttgcttttggagctttctcctgatatctgtggctgattgggtaataaacttatcttttagaatcaattgaccctcgagtgattcgggtgacaggggagtatattttcttaaggcctcttgtagccgctcgaggaaggcagaaggattttcttcctttccctgggttatggtggatatcattgaataattcatgggctttttcccaattctccttagtccttccagaacacagatcaacagatgtttacgactccagtccccatgatctgagtcaaagtcccagtggggatccatactggggatggcttgctgaccagtagggaagttgtccctttcttcggctgtcattctttcatttacttgactaggataccaggtatctccaaactctcaggctgcagctaaagccgcattcttttcattaaaggccagggtttgatctaacagtagcatgacgtctctccaagtgaggtcaaaggtttgccctagaccctgtaggacatctatgtacctatcaggatcatctgaaaacttccccaggtctgccttgatctgctttaaatcagagagggagaaggggacatgcacccgggttgggccaaattcccctccccctacagcttgaaggggacataaccgatagcccgggggtttttgtggacctttggagatttctttgcttatttccttctgggcaggggagattagaggaggagtatcatcaataggaagggaagctatagggaggctaggatatgggggtaagctgaggggtcctcctgtgggatgtaaattgcaagctttgcatagttgtgtattctccctcaatgaaaagaaagcttggacataaggtatttcactccatttgccttccctcttacagaaaagatcaagctgcaggatagtattgtaatttgtgcttccctcaggtggccatttttccccatcagaaagagaatattggggccaagccgtagtgcaggaaaaaatgagcctcctctttttcagggtttgtgggtcaaattggtcccaatggcttaggatgcatttcaagggtgaacctgttgatgcctgagtgtttcccatatgaaagacaaaaccgcccacagttttggtttgttttgtttctctccctgcccaaggacctgcaatggtcctgggaccctgctgatcagaatagttgcattcaccaatgcagcagcagaaacaacccctgcccaagaacctgcaacggtccctggaccctgctgacttgaatagttgcgctcaccgacgcagcagcagaaacactagttttcctcccagaccacatggaggaccgaggaaggtcggatttagtggtccttactgacgcattctcgaaaacctgcacccttgcctgtcctcctagaccacaaggaggaccgactgagaaaaatcagatttagtggcccttactgacgcattctcaaaaaacctgttagagtcctaagcattctcctgttagtattgggactttaccccatcctataaagatgttatgccacaaaaatgaaatggagggccataccctgagggagggaggggatcttcagggttggaagagtgacaccttttgttctcacttatatgaataggaaggatacaatttctgaggctccccatatcctagcttcaggaataacttttgttaggcctgttagtctgaggagggatcctaaaattcctagtagtccccactacagcagggctttgggcaaaaactgtgtctttctgattggtgagcctgggtgcctaaagaaggtaacagagtcctggagtttatactagaagtcattcttataggagaaacaagaaaagcaccagaggcaggtagcaatttttagaagcgggtctagcctcagagaagagaggcgagaggaagtttgtctggcaggcattaggacccagagggcaagggtcaggatagataggatagataggcgagtgtcgcttgggcgacatgcttttgagagttccactcatggccgcagggtcaaccaacatgttgtcgggaccccggagatgcatggctttcctcactgtcaacccacggctcagcccagaagtacaggaaaagcggaagctggttctaggcaaaccaacggtcccaactccaaagagttgggggttgttagagagccctttcccagaaagcttgacacccgtgtctttagtccggcggcccgctagtcacttttaaatggctgacagatgcccggtatttagcccccgaattctaaagaaagataggacagaatagcaagtgaaaggggtccgatggtactcactgcttggcgattgggaaaggtctcaccgctcggctattgtctcaccgcttggcgatatgcgaaagtcccttcgtggtcgccaaaatgtgtccggaattggtgggttcttggtctcactgacttcaaggatgaagccgcaaaccctcgtggtgagtgttacagctcttaaggtggcgcatctggagtctgtcccttctgatgttcagatgtgtttggagtttcttccttctggtgggttcgtggtcttgctggctcaggagtgaagctgcagaccttcgtggtgagtgttacagctcttaaggtggcgcatctggagtctgtcccttctgatgttctgatgtgttcggagtttcttccttctggtgggttcgtggtctcgctggctcaggagtgaagctgcagaccttcgtggtgagtgttacagctcttaaggcagcacgtctggagttgttcgttcctcccagtgggctcatggtcttgctgggctcaggagtgaagctgcagatcttcgcggtgagtgttacagctcataaaagcagcgtggacccaaagagtgagcagtagcaagatttattgcaaagagcgaaagaacaaagcttccacagtgtggaaggggacccgagaaggttgccaatgctggctcgggcagcctgcttttattgtcttttctggccccacccacatcctgctgattggtagagccgagtggcctgttttgtcagggcgctgattggtgcgtttacaatccctgagctagatacaaaggttctccacgtccccatcagattagttagatacagagtttctacacacaggttctccagggccccaccagagcagctagatacagagtgtcgattggtgcactcacaaaccttgagctaaacacagggtgctgattggggtatttacaatccctgagctagacataaaggttcaccaaggccccaccagagcagctagatacacagtgtcgattggtgcactcacaaaccttgagctaaacagagggtgctgattggtgtatttacaaaccttgagctagatacagagtgccgattggtgtatttacaatccttgagctagacataaaggttctccacatcctcaccagagcagctagatacggagtgttgattggtgcactcacaaaccttgagctaaacacagggtgctggttggggtatttacaatccctgagctagacataaaggttctccaaggccccaccagagcagctagatacagagtgttgattggtgcactcacaaaccttgagctagacacagggtgctgattggtgtgtttacaatctctgagctagatataaagactctccacgtccccaccagaccaggagcccagctggcttcaccgagtggatcccgcactggggctgcaggtggagctgcctgccagtcccatgccatgagctcgtactcgtcagcccttgggtggtcgatgggactgggcgccgtggagcaggggatggtattcgttggggaggctcgggctgcacaggaacccacggaggcaggggaaggcttaggcatggcgggctgcaggtctcgagccctgccccgtgggaaggcagctaaggctcagcgagaaatcgagcgtagcgccggtgggctggcactgctgggggacccagtacaccctccgcagctgctggcccgggtgctaagcccctcactgcccggggccagcagggctggccggctgctctgagtgcggggccctccaagcccatgcccacctagaactccagctggcccgcaagcaccatgtgcagccctggttcccgctcacgcctctccctccacacctccccgcaagctgagggagtgggctccagccttggccagcccagaaaggggctcccacagtgtagtggtgggctgaagggctcctcaaatgctgccaaagtgggagcccaggcagaggaggtgccaagagcaagtgagggctctgaggactgccagcacgctgtcacctcttaatcctactgtgctatcaaacactagaatgtatttcttctatctaactgtatttttttttttttttttttttttttttgagacggagtctcgctctgtcgcccaggccggactgcggactgcagtggcgcaatctcggctcactgcaagctccgcttcccgggttcacgccattctcctgcctcagcctcccgagtagctgggactacaggcgcccgccaccgcgcccggctaattttttgtatttttagtagagacggggtttcaccttgttagccaggatggtctcgatctcctgacctcatgatgcacccgcctcggcctcccaaagtgctgggattacaggcgtgagccaccgggcccggcctatctaactgtatttttaaacccttaagccaacctgtgttcattccccttactcctacacttcctagcctctggcaaccatcattttattcgcaacttccaggagatcaatttttttagctcccacatatgagtaagaacatgcaatgtttgtgtttctgtgcctggcttatttcacttaacataataacctccagtttgatctgtgttgctgcaaaggaaaggattttattcctttttatggctgaatggtattctgttgtgtatgtatatgtgtatatatatattatatatatatatacacatacatatgtattatatatatacacacatacatatatatatatcaaaatttccttatccatccactagtggacagttaggttaattcagtattttggttattatgaatagtgctgcagtaaacatgggcatgcagctatctctttgatatactgatttccttttttttggatgtatactcagcagtgaggttgctggatcatatggtacatctatttttagttttttgaggaaactccatgcttttactcatagtggctgtactaattgccattcccaccagcagtgaactagtattcccctttctccacatcctcaccagtacctgttattgtttgtctttttgataatagcagttttaacagggatgagatgatatctcaatgtgattttgatttgcatttccctgatgattagtgatgttgaacattttttcgtaaatgtttgttggtcatttgtatgtcttcttttgagaaatgtctatttagatcatttgcccattttaaaataagatgatgatgatgattgttattattattttgctattgagtttgaactccttatgtattctgtttattaatactttatcacatagacagcttgcaaatagtttctcccattatgtaggttgtctctgcattctgtcgattatttcctttgctgtgcaaaagcttttcagcttgatgtatttccatttgtctatttttgcttttgttgcctgtgcttttgcagtcttacccaaaatatctgcctagaccaatgttctaaagtgtttcaccaatgttttcttctgtagtttcatagtttcaggtcttacatttaattctttaatccactttaatttaatttttgaatacggtgagaaatagaggtctagttttattcttctgcatatggatattcaattttcctagaactatttattgatgagcctgttctttccccattgaatgttcttggttacttgtcaaaaatcagttggcagtaaatatgtggatttatttctgggttctctattctgttccattgtgcctatgtgtccgtttttatgccaggtccaagctgttttggttactgtagctttgtagtacatattagagtcagctcatgtgatgcctccagctttgttatttttgctcaggatttctttggctatttggggtcttctgtggttccatatgaattttagaatttttttttctaggctgggtgcagtggctcatgcctgtaatcccagcactttgggaggtcaaggcgggtggatcatttgaggtcaggagttcaagaccagcctggccaacatggtgaaaccctgtttctactaaaaatacaagaaaaaaaaaaagggctgggtgcggtagctcacgcctgtaatcccagtactttgggaggccaaggcaggtggatcacctgaggacagaagttcgagaccagcctggccaacacggtgaaactccgtctctactataaatacaaaaattagctgaatgtggtggcaggtgcctgtaatcccagttacttgggaggctgaggcaggagaatcgcttgaacctgggaggcagaggttgcagtgagccaagatcacaccattgcactccagcctgggcaacaagagtgaaactccgtctcaaaacaaaagcaaaaataattagctgggcatgatggtgcacgcctgtaatcccagctactggggaggctgaggcaggagaatcacttgaacccaggagatggaggtcgcagtgagctgagatcatgccactgcactccagcctgggaaacagagcgagactctgtctcaaaaaaaaaaaaaaaaaaaaaaaaaaaaagaattgtttttctaaagaatgtcattgatattttgatacagattgcattgaatctatagattgcttttgggagtacaattttttttacaatattcttcccattcatagacataggatatatttccattttttggtgacatcttcaatttctttcatcagtgttttatggtttttccttgcagcgatctttcacctctttggttaaatttatttatgggtgtgtttttaaaagtagctattgtaaaagggattgcttccttgatttttttttttatgctagttcattgctggtatatagaaacactactgatttttatatgctaattttgtatcgtgaaactttattgaatttatcagctctaagagtgtcttggtggagcttgttagggttttctatatatgagatcatgttatctgcaaacagggacaatttggcttcctctttttcaatttggatgctctttattcctttctgttgcctaattgctctggctaggacttccagtactatgttgaataagagtggtaagagtggtcatccttgtcttgttctggttcttagagaaaagctttcagtttttccccaatcagtgtattgttaaatatgggtttgtcttatatggcctttagagtgttgaggtatgctttttttatatctagcttgtttagggtttttatcatgaaacgttgttgaatgttatcaaatgctttttgcatctattgagatgatatttttttttattcttcattgtgtttatgtgatgtgtcacatttattgatttgtgtatgttaactattcttgcatccctgtgataaatctcacttgtatcctcttgctgaattgatctctttttctttacataataacctcctttgcctctttttatacttttgacttaaaaaatctgtttaatctcatataagcatagctactcctgtttgcttttggtttctgtttacatggaatatctttttccatcctttcactttgcatctatatgtgtttccacaggtgaaggaagattcttgtaggtagcacataagtgggtcatttttttaaagatccattcagccggccgatctttttttttttttttttttttttttttttttttttttgaggcaaagcctcactctgttgtccaggctggaatgcagtggtgtaatctcggctcactgcaacctctgcttctcaggttcaagtgattctcccacctcaaccctccaagtagctgggactataggcatgtgccaccatgtctggctaatttttttttgtatttttagtagagacagggtttcaccatgttggctaggctggtctcaaactcctgaccttcaagtgatctgcctgcctcgacctcccaaagtgctgggattacaggcatgagccctatgcccggcctcagcaagtctatcttttaagtggggaatttaatccatttacatccaaggttattattgataggagaggagtgactcctgtcatttgtaaattgttttctagattattttgtatatcctttgttaatttcttcttctattattgtttcttattgtgatttggtaggtttttgtagtactgaggcttgatccttttctttctcctttgtgtatctgctctgccagtgagtttatacttttctatgttctcatgattgtgattatcatctttttgcttccaaacgtaggactcccttgagcatttcttgtagagccagtttagtggtgatggattccctcagtttttccttttctgggaaagactttgtttctccctcatttctgaagaatagacttgctgggtgtggtattctcagttgacagctttttttccacccctttcagatcttgggctatatcatccctttctctcctggcctgtaagatttctgctgagaattttgctgtttgtctaatgggattcccttatatgtgacctaacacttttcttttactgtttttagaattttctctttgtctttgactattgacaacttgactataatatacttcaggaaggacctttttggggttgaatctatttagggacttgagcttcctagatctgaatattcatatctctccccagacttgggacattttcagctattatttcattaagtaggttttctatacctttttacatctcttttctttctggaactcctgtaatatgaatatttattcacttaatagtatcccttaggttttgtaggctttctttactctttttcatttttatttcttttctttctctcactgggtaatgtcaaacaatttatcttcaagttcagagatccttttttctgcttgatcaagtctgctgtggaagctcttcattatatttttaaattccattcattgaattcattagctgtgtttcttttttgtgatatctatctcttcactgaatttctcattcatatcatgtattatttttctgatttcatcaaatagtctatctgtattttttgaatttcattaagtttccttaagatcattattttgaattccttttctgacaatgtatcgatttctttttaattggggtctgtttctagagagttattatgttcctttggtggtgtcatgttttcttgctttcttcatgttccttgtgtccttgcattgaggtctgtgtatctggtggaacaattgcctcttctaaactttctagagtggctttcttagagaaatacttttacctcagttgaattttaatgtgccagttgggaagggtggttcacgtaggttcggtggtatagtctttgtgcagcttctttggctgtgtttgacatcagcaataactatgggcatatcagtggcctagactacagaagtttgtggtagtggtggtggcagtataggttgttaatgtccttggtagcaagggctattctattcttattttctccataatgggaagacttagctgaaagtctccctcttggggtcaggtctgacatggcatagaagcagttgccatgacactgggtttcaagtacaggtgctcaaagcaactgtggggcaaggtcttacttaggctcaaggtcttgtgaacctatagtggcacttgagtcttgggatgcagagtgatctctgtgtcagggctggatataggatgcctatagtgcctagcagcttggcttcagggggtcagtttgtaactgtaattctacccctgatgggcagggtgcagccgtggtttaacttggaggaagaagaagtgctctggaagtgtgagaccaggttgcaggatatggctgtaattgctgtaatttggaaacctgcaccaatagagctcagtggcaacttggatccctaggggtgaggaattgtgtagtggggattctaaactctacaatggtgggacttggcagtatcccagtctctgtaaggccagatgcagcagcagcaagcatcccaaaataatcaagcacactgttttttgggctgtaccagggcagggagcagcacaacaatgactctactccctgggagaagagtgtctcaggagctcagactcagggggcctagtccagctctagggaagaataatactagagttgtctggccagtagggtggggtgtcttagccaaccactgctgtatttccctgggacctagggtactatgtcagcacagccctaggacgtgcagctgctcagcttggttgaggcactgattccccagtgggcaatgtgccactccagctcagtcctgagggatgtgactatgctggatggcctcaacaccattttcctgggatatagggctctgccaaaagcattgttccctggggagcttccctgaggagctgaaactagtgcagtttcagctcaggcccctacgagtagagtgctgcctagtgtgacagaagtggatggagctgttttaccaaagtaatgattctccacgaaagagcgtgcagtttcagctctggaatgagtgggtaggggagggggatgtggagtcgttccactgctgcttggccccatggggaaaggtgtaacagttgctcacagctccgcttggagatgtcaggtcactgggtggtggtgtctcagcagcagtttacccttagggatgaaggggtgaatggctactcaccccgagagcaagacacattccaacagtagctccagttccaagacaccaagacggtgtagtacaatagccatgcaggccacagggggtggggcacagtgttggctccatttctgagggagcacagttgtgtacctgtaggcagctccctcagctgggcttagtgcctctgagagctgtaggagatcccagtggtgaggactgtaggtgtacaaggtgctgataggggctactgggatcttcttgcttacgttttgctgtagggagaagttcttcctggtttccagctgctcttacctgggcaatggggtggtggggtcccagtgtttccttctgttctctatgtggccatcctgagtttctgtgctcaccagagtttctgtttctcctttgacagaattctgcactctcctttagttattttttttttaaatgtcgttgtttattcttttagttgtttttgtgcagaagatgagtgtcagggatttctaactggccatcttgctgatgtcacactaggagacatgttattagctcatataatattcacaataactctgtagaatatgtactaatattatttttccctgccttttttttcttgtggagaaaattgaggcagagaggtaggtttgcccttaattatattttaaattatagagtaaatattctgtggcttcagagtggtaaacactgtaatactttaacattttcaaagcccctttgctacatatcatttttttctcttggtttacagagctactcagagtgataagtgcaataatcattaacaaccccttgttacaaatacagaagtaaagcaacttgccccaagtcacaaaaacaagttagtaagttatgaaattagttacatgcatggaatattcatgcttgaatgaaccttaaaagtttatctaacccaaacctcagattttacagatgaagaagctgaggcccagccaggaacagctgaactgtccggagccacaactggcagatggcagagctgggattagattgctagtaacctggctccaacctgcacctctgctctgcctctctgggctggaactagaacccagtgcttctgactttggatttagttctcataccactctcctgtgctgccttgttgaaaatccaagaatccagctgtggggataaggtctatatccatgaaacaactgaaaaccagcatatgatatggagaaaccataagaacaggaaactgccttaccacaagtaaaatgcccagatctcactctttggtaccagttcatagtgttcattgatcagcaattttttttttcagacattgacagcccccaaaacctggtgaccgaccgggtgacagagaatatggccactgtctcctgggacccggtgcgggccaccattgacaggtatgtggtgcgctacacctctgccaaggacggagagaccagggaggttccggtggggaaggagcagagtagcactgtcctgacgggcctgaggccgggtgtggagtacacggtgcacgtgtgggcccagaagggggcccaggagagcaagaaggctgacaccaaggcccagacaggtaaggagcattgttctttgggaatataagagctttcatgctaagtcagtggatgacaagttttgttttccttctctgacattggcagaagtcaatgattaatggaagagtgggatggcatcccttcataacagattgcacacaccatccctcattttcctttaactagtttccttgcaagtcagggccacaaggcagtctccaagctatgattacatggtcatgtccatcaactcctcttctgattgcatggatcttttgctgtagacagtatcgagggtctcttagtgagtttgtgagtgggaacagaaaatgaaaatcaaattttgttaataataatagtatattgaaaatttgactttaagaacgtagatgtcacatctgccatagcaaggagatgtatatcatttgctttatgacaaatgaatcacattataactataaaacatatttataactagaaattatgataagttctatgaaggagatgacatggtgtaggtatagagaataatgaagtagtgatgtttctcagataggaaggggaaatagtaataggatacacatggccaaaacaaccaaataacagttgcttaaacaagaaaggagcgtattcctcttgttgaatagcagagtgtacgttggccagagttttgaggataaggatagctcctacgttatattcttattttagtggaagcgatatctaaccatattttgtacagtgatttaatcagcaaaccagcatgatgagtgaatctatgatatgctagagaatattcaaccagggttttactttttgcggattcctttagtaatatatagtgagcattttccacgtgccctgcccactactaggcactgggaacacaggagaataggatgctgccctcttcctccaggggcttacatttagaagtggcttttagaatcttctagtatgaaatgggaggtctttactgacatgatgtgagacacaaaattgttagttcctggtgagcagagaccatgtcttttccaattctggattctgcacactgtctagaacatttcatggacagagttggggcttgatatacccttactagatgaataaaagatttgttttgctaaagacttggtagaggtaacagcctggattctcaggttctgatctattgtgctttctacttgaggagccaggtatatcttgggggagaagatgatgtccatgaaacagctaaaaatgaaacaagagcatatgaggcggaaaccccacacaacatgaaagggtttcaccccacgcaaaatgaccaccagtttctgcactctggcacctgttcatagtgcatattggtcagcattttttttttcagacattgacagcccccaaaacctggtcactgactgggtgacagagaatacagccactgtctcctgggacccggtgcaggccaccattgacaggtatgtggtgcactacacgtctgccaacggagagaccagggaggttccagtggggaaggagcagagcagcactgtcctgacgggcctgaggccgggcatggagtacacggtgcacgtgtgggcccagaaggggaaccaggagagcaagaaggctgacaccaaggcccagacaggtaatagaagtgaagagaagagcaaacccgggtagtagctgcaggttgatctattgcagctgagtgatgatgcagctgcttttggcatctgtaacctcagggctgcagactgttttaggagagtttgctgtaaaaacaaaacaaaacaaaaacaaaaaacaaacaaagaaacaaaaaactttcattcacccaaagaaagaacaacgtgttataggaaaggcgtcccgatccagacccttagaaagggttcttggatcttgtgcaagaaagagttcagggtgagcccatagagtaaagtgaaagcaagtttattaggaaagtaaaggaataaaagaatggctactagccatgggcagagcagccctgagggcttgtggttgtccatttttatggttatttcttgaagatatgctaaacaagaggtggattattcatacctcccctttttagaccatatagggtgacttcctgacattgccttggcatttgtaaactgtcatggcactggtgggagtgtagtagtgaggatgaccagaggtcactctcattgccatcttcgttttggtgggtcttggccggcttctttactgcaggctgttttaacagcacggtctttatgacctgtatcttgtgctgacctcctatcttatcctgtgacttagaatgccttaaccatctgggaatgcagcccagtaggtttcacccttatttgacccagttcctattcaagatggagtttctctggttcaagcatgtctgacaaaactatagtaatggacccagtgggagcagtcccatgaatgccttttttttcttttttttttttttttgagacagtcttgccctgtcgcccaggctggagtgcagtggcgctatctcggctcactgcaagctccgcctcccgggttcatgccattctcctgcctcagcctcccaagtagctgggattacaagcgcccgccaccatgcccggctaattttgtttttgtatttttagtagagacggggtttcaccgtgttagccaggatggtctcaatctcctgacctcgtgatccgcctaccatggcctcccaaagtgctgggattacaggcatgagccactgcgcctgggcccatgaatgtcttaaaactctttccaaagcctgtgtttttaatcattgtgtctctcagctataggaaataatgtaaaaccaatataaaattcttaaaaccactgattaaaaacctgttttgtggcaagctattttgtataggtttgaccgaatagacgctgtgtgatagaaaggagcaagtattcacctgggtggctggagccctgtttccttgcagtaggcagctgacttttaatgagcatcatctaagtgccaggcctggggaacacagtggtgaacaaaacaaatatctctactctcttgaagtctagagtgaagatagacaataaataagaaaacacatttaaaaccgtaaattatgctaaattctgtgaaggagatgaacatggtgtaggtatagagaattacagggtaaggatgtcttgcagatgggaagggtgagtagtaataggatatacatagacagaaacactcaaataacagttgcatcagcaggaatggagtgtattcctctctgtagaatgtccagggctgatacggtagctcctcgtccaggagacccaggcttcttctgtgattgttgcttagtcatccctagcaatttgccctcctttacctggtcaccaccctgtctgcattgtagccagtgggaagaggcatgatgaaagtcagggcatcactgggacattgcacatatcagcccttctcatgttccattgccaggtcccagacagacctcactgcaaaaaaggctaggaaatgaggtctttagctggatggccctgtgcccagctttactttggttatgctgtcctgaccaacacagcagctgctagctacatgtagctattaaaattatttttatttttattttattttcagagacagggtctcattctgttagctaggctggagtacagtggtatgatcacagttcactgcaggcttgacctcccgggctcaagccatcctcccaccttagcttcccaagtagctgggaccataggcacgtgccactaaacctgtaattttttatttcttttagagatggggtctcactgtgttgaactcctgggctcaagtgatcctcctgcctcggcttcccaaagtgctgggattacaggcatgggtcactatgcccagcctaaattttaattaattaaaaataaaataaaaatattttctcatttggattagccacatttcaaatggtcagtagccacatgtgactaatggctacggtatcggactgtgccgattatagaatactttcatcattgcagagagatctgttggacagtaagtgtgcttacagaagaagggggagaatggattttggcgaaaactagccatttctggcaaagggaagagtatgtgtgatgtcccccagctggaatagtacctgggatggttggagaatgaaaagaggccagttttgctggagcatagagggtggaagagcaagtggcctgagatgaggtgggaggagcaggggcagatcagccaggaccatgtggtacttagaggacaaaatgggctatacttattaatactagaagagtgatatgatgcagtgttcatttaaaaaacattttccaggccacagtgaggagaataaatggagaaaatgacaaggatagaagttgggaggttcgtagggaagctgctagaaaagtctgggtgcaaaatgctgattgtctaggtaagcatgatggcaaaagggacagagaagaggggatgtctggaatatatttttgaggtatggataatacctgttgatagatgtggggtaggaagaaaatgaggactcaagtatgacctgtgttttttatttgagcaacatgggagattggactaccatttcttgagaggggagactgagaaataaaaagtttggggagaaacatcaagacttttaaatatttaagttcaagatacttgtgagattccttggttaattgagtgattcatttattgattacataaatatttattgagtgtctaatacaggccaggcaccgtggtggagatgcagttgtataaactagtcaggggctcagaattaatagatattatggagcgattagcatccagttggtatttaaagccatgggcatgagtgagatcacctaggtggaaaagtacagagaggaaaagagggagctttgggacaggtgcagtgactctcacctgtaatcccagaacttttggaggctgaggtaggtgaattgcttgagctcaggagttcaagaccagcctggtgaaatcctgtctttacaaaaaaaaaaaaaatacaaaaattggctgagtgtggtggcatgcacctgtattcccagctactctggaggctgaggtgggaggattgcttgagcctgggaggtcaaggctgcagtgacctatgatggcaccactgctctccagcttgggtgaaagaccgagactctgtatcaacaaaacaaaacaaaacacaacaaataacagagaaagggagctttgggtgctccagtgtttgaaggttgaagtcatggaagccaagggttgagagtgtttcaagaaggaaggagtggatcagctctgccaaatgccacccagaagcagtgtaaagttgagaatggcaagtatgcattagatgtggcaacacggatgttgttggtgacttagactagcagatttagttgtgtggcatagaaagatgcaaacaggattgattggaagagtgagcagtgaagttaaggtatgtagacattttctcttgagacaatctgtcagtttaaggttgcagagaaatggaatgatacgggagaggatgggggattctagaccttgcttgtctgggactgatgacagagaagaagagaatgatgacacaggagagaaagggcagatctgcagcaaagtccttgagagggtgggaaggcctaaaattcagagcgaagagtcttggctttaacataagatgtcaacaggaacttggcctagaccttccatttccctgggcctccattctcatccccttttataagtcggaaaggttggaggatatgacttcttggctctcaaattctgtgaaacaaaataactagataccagggagatcagaaaagaggttatatccacagcagttttggtggcttatcttgttgctcaggaagttttattgttattttgatgagaattacaaggacagaaattttttatattaaaaagtgggagatgatctgattccttccagttttatatccagtggtttgtttccttggaaatggagaccaggggcctttgactcgtgttttaagtggaattctaccattattaatgataacatgatggagagctcctggtgatgaggtggtaagatgcgatgtcttcctttgttctaaagttcagccttttctaaatctttttaaaaagaaattgacggccccaaaaacctagtgactgactgggtgacggagaatatggccactgtctcctgggacccggttcaggccaccattgacaagtacatggtgcgctacacctctgctgacggagagaccagggaggttctggtggggaaggagcacagcagcactgtcctgatgggcctgagaccaggcatggagtacatggtgcacgtgtgggcccagaagggggcccaggagagcaagaaggctgacaccaaggcccagacaggtactgagagggaccaggccaggggaacacctcacacttaccaggagagaaccttcctccatcagtgggctggggaggggagcaggagggtggttgctttacccgaggacattcttcaaagtggttccttttttacgtctttgagctaattaagttgacacaacagctcagataagatgagagagtatagagggagtgctggtgtcaaaggtggcctccctcacccctccacccggcccagcgctcagaatctccacacttgctatggagaaaatggttgggcctcagctgcagttgggagaagacagaggcaggagcctcttctgtttccatcttccagaatggaggcaatggggatgcatctttctccattccatcctcagttgatgatgaaaggtgcctgaattgcatgtattttgtgtgtgtgatggggcctctgatcttggcagagcatcactgaggtcagaacccagaggcacttggaagagagcactgtgcccaccctgaggtctatgagcctcttctggcagtacgggcaaggtctgtccattccatccatggctgagctcaccaagtgttgccacgggacctagagatggcttgaatttctctatggtttttattagttaaaattagcttgcatttttaatctaaaaagtaatatatgcttatagtaaatattttcaaactaaatagagacgtgttaaaacaaaacaaaacaaaacaaaaacggccaggcgcggtggctcatgcctgtaatcccagccctttgggaggtcgaggctggtggatcacctgaggtcaggagtttgagaccagcctgaccaacatggagaaaccccgtctctactaaaaatacaaaaattagctgggtgtggtggcaggtgcctgtaatcccagctacttgggaggctgagacaggagaattgcttgaacccaggaggaggaggttgcagtgagccaagattgcgccattgcactccagcctgggcaacaaagagcgagactccatctcaaaagcaaacaaacaaacaaacaaacaaacaaactcctctctctgtcctggactccctagtatgcagggttgctctccagatgcaaccagtagccagttctcccttcttccctctttcccacttcctacctccttctccccttcctttctctgttcctttctctcttattcctttcttctcctcttccttgtttatcttctcttggattcaccttctccatttttgaagacagcaataaaaagattctcattttcctgcttcatagaaatgtgaaagtaactaagacagacatctcaagtccataaccagggagtggtgggcagtcaaagaggtggcaggagattgcttaagatgttaaaatagccacagttttgccttgattgtgaaatcaggaaattcagtttttctgtgagacgaatagaataaaatccatgccagatgttatgctttagaaaatcaaaccaagttgatattacagaaactcaaaatttgtcaaaacatcctaattcaaaacaacagctgtctgatttctattaaaatactgcaattcagctctcagctgaaatgctactgggtagaaaatagcctggagacgtctttttgggaagttataaattaaaataaccttctatgataatgctttttcaaaagagaaatttccattcatatcttctttggttaaaaaaaaaaagagccttctgaccagtgatgttgaccagtatttttgctgagcttctgttttcctggtctacagtgcacacttgcttacccacgcgttccctctagtgtttgggtgaggaagtacatagaagaagagctctgcttttcctatatcccttctctttccctcttccctcccccacctcttcctttcttctcttttccttccttctctctctctccctctttctttctctttctttctttctctctctctctccctttctctcttcttttctctctctccttccttccttccttctctccctccctccctcctctctttctctcttttttctctttctttctttctttctttctttctttctttctttctttctttctttctttctctctctctccctccctttctctcttcttttctctctctccttccttccttccctccctccctcctttctttctttcttttttctttttctttctttcttttttctttttctttctttcttttctttttttctttctttctctctcccgctctctctctcttctctttctttctttctctcgcttctctccctttctttctttccttctctctctctctctctctcctctatacaagcacctgttcccttgccttctccttctcttctttctctactgggtatgcatctaaggccacacacttcaatatgtaacagtatgtaagaaacataactttttgtttctttcttttttttttttttttttaagacagagtcttgctctgtcacccaggctggagtgcagtggcgtgatcttggcttactgcaacctccgcctcccgagttcaagcaattctcctgcctcagcctcccgagtagctgggatgacaggcgaccaccaccacacccggctaatttttgtatgtttggtagagataggatttcatcatattggccaggctggtgtcgaactattgaccttgtgatccgcctgccttggcctcccgaagtgctgggattacaggcatgagccaccgtgcctggccaactttttgtttctatgccaacttaatttcaatcataagcccatattctacttagggtaagctccttcctcagggctgtatgtaagtcttgggtagtttcccagtgacaggcattggggcccatccagcatttcaggcaactttccaggcgggccaagtcaccctggtttctttgtgcatggccctttcagatctgtggccctcttatctttccacatccttttgggagccctgccatctctgaggatctatctgccaatctaggctgttaatatccaccactttgtgggaacctgcctgggaaatgggggcccagattcctttcctctgggacccacccaacgccctgttcttcttgtctctaatgggtctgtacttgtagaaacaaaggtcagaaaggtcctgtggcagggaggaagagagcctgcaaactgcttgaaagaaggaggagaaatgggagggtttgaaaaggggaaaatataaactgatgtctcaaaaattaccttgcctcagttgtatcttagtaataacaattacctgactttctacgtacagaactcgaccctcccagaaaccttcgtccatctgctgtaacgcagtctggtggcatattgacctggacgcccccctctgctcagatccacggctacattctgacttaccagttcccagatggcacagttaaggtacggggattccttgtcttttctcctggtgccttctcttctgtgtgaagcaactaacttgggccaatcagctcatttgctggcctcacggcaacttgctgatctttactgatcacattgctggttgtacatctgccccgggttattttgtttattgttagtcttccccaataaatgtaagctctatgtttgtctgtttcatttatcaccatatctaaagtgcataggacagtgcttagcacatggtaggtgttcgatatatatttattgaacaaattgattaacccttatttcaagggttatacctccccttagaatctgaaggccagcaaattttcaaaacctgtcccaatggaaaattattattctccctccttgccaatgaagaaagaagggaggaaataaaaacaggaaggacacttaggtttatgtgttaccttaattagtgcttatgacagcacagctaggaaggttagccctatgtttatagaggaagtaagactggttcagaaggaagtttattgaaatatcaactatctccttgtctcagatatcagtggccagtttcacctcccctattaatttctccttagcgcggcattgccagcctgttcctgctggcaatgtagccactatagttagagcccctgtgtgtatctgaaggccaaagtctcccagaaacttggccggtgatcctgaagctgcagtcctgggtgctggttctcagctgatgctcccagtagtgctgactctccatggcatggctctccagagaagtggctgggacccactgcgattctgggctgccactgaggcttcggagagacaaaacactgtgctctcagagagcttctgtcattagcaccagggaacgctgttgacacctagggtgctagtgggtgataaactgagtcactggctgtctaatctctcccttgtttggtaggagatgcagctgggacgggaagaccagaggtttgcgttgcaaggccttgagcaaggcgccacctaccctgtctcccttgttgcctttaagggtggtcgccggagcagaaatgtatccaccaccctctccacaggtaatatggaatcctgtactctgaacgaccatgcaatgagaaccagcatcggaaagcctagcaaaggagtccagggaggagcaagtggatgcagaactattgatttctctaggcatggggaagtggaaatggggttgtgtgttcaaaagaaatccaccccacagtggggaggctaaagagaggagtgaaatagagtgttactttgtgagggagctgagttgggggaggaagtgatgtgaacttgaccttttcctggtgcatttggggagttgatgagaaaaataagatatgagtgaagagttggaagaagctgaagtaggaagttatgaaataatttccaaacaaaataaattgccttaaaataggaagaaactccacctctttcctccttgcccttgtcctaacaacactctctctgcttggctcccagttggtgcccgtttcccacacccttcggactgcagtcaggttcagcagaacagcaatgccgccagtggtctgtacaccatctacctgcatggcgatgccagccggcccctgcaggtgtactgtgacatggaaacggacggaggtggctggattgtgagtcacgcagaaccctggggagctctgtgtagggccttccttctcagcccaggatgccggtcatggatgctccatagagtgtttggagccctatttcttctccactcatggaagagaggagttttggtggcttgtagctgtttttagagagatcccaatgttacaggaaaggggtccccatccagatcccaagagaaggttcttggatctcatgtaagaaagaattcagggtgagtccacaatgcaaagcaaaagcaagtttattaagaaagtaaagtggtgaaagtacagctactccatagacagagtagggcgtttctgaaagtaaggaggaatgcatgcaccctatgtacaagacttgtttatatataggataaaaaaagatcatgaggggatgtgctctattacaatggttcgtgataaaggattaattttcttaattactatattttgcgagaatcaatattattatatttaaagcaacattaggagtgcttctgttctcaagatatcaggacattcctaagtctgggtctgtttagtaaacactgtcaatctgttcccttaaccataaacatctggaggctaggaatacctaactttctgggaatgcagcccagcaagtcccagcctcattgtcttagcactcactcaagatggctctggttcaaatgcctctgacaccaatcaactgtaaggatagagcctagtacttaaccactgtcctagaacaggcttggttagactaaggctgatgactatgaaggcttgtgagttgatcatcatctagtaatgccttatatgtatgtattacctatattttaccttcttcaaagcacttctgtacacatgaccctcacacaacagctttagagtaagtgagagaggattgtttttcttattttacagatagggacagtgagtcccacagaaagaagtgcctggcctaagtcatacaagaatgacaaagctgggaccagatttcaaaactccagcctcctaatcattggtcttctcagtgagttcatctcaggtcatccaagatgcgaatgcatagcctgactggggagttcagacctctgaactggagtccattgtccaagttctgtaccctgtctccacagtacagcaacaaggcctttgaggttttgattggaaagactaaagtctgaaagacggaaacttgggcaatgctctaattgtccctcttctgtgtagatgttttattctcttgggccattgtctgcctaaaccacatggcagcttctttgattgcatcagcctgatccaattatatgataagctgtttttgagggttgcaatctgatccttccatctccccttgccccttttctccctgtgcctgaatgataaagactctcactgctccaagccagcatgcagccttaacctgctgtgcatccgcaactcactgtgggaaagagagagcatgatctcatagtgctcaaaccttattcatttacacattcactcaggggcctgggaaaccaaagacacttgagcagccatgaataaaaagataccatctgatgagcagcaatgaagaaaacttattatctgcacagcgacatctgacggttgaaaggcagtaattggattggctgggggaaattcccgattgatttataaaaacaacagagcagaatgtaacatgggaggtcttccacttgaccagacccatagggctgtacctgctgcttttcatcagcaccattgtaaggctaagcattctgtcccttcaggcctgcagcccaatttcctgcctttgtgcctgtaattgacttttggcaggacgtttgtattgtctagtgtggcctttttgtaagccaagctcccacacagaaggagttatctggggcaacatttagaaagagatctgtcagtctgtctgccctggaatagtcatgacttattgcacatatatttattgagtgcctactatgtgtcggcactgcttcatgtactcaagatccagcagtgaaccaaaccaacagaaatccctgcccccaaggagcttgccatttacatcctgctcatgcaaatgacccctcctcaaacacagagatcggttccaaaaataataaaaccactgtgcattctcaccctccccagccccaaccccaccccaagtcttgttttctgagccagactcctgggggtcatgcatgaactgaggttctgcagggttttacttaaagccaccatgctccagaaaacatggagtcctgaaaacttccccacaaaacattttactgacagttgttacagtttttttgggggggttcaagagtcctttgtcactgaaggatgacccatggtctgtttctctgttttattgagctttcaaaatccttttatggtaattcttccatcccaagcaacaggaactcaatctgaagaataggccagaagaactgtgccctgaggtaaactctgccgctggtgggaggctggaaagaacatcagggaacacttaatgtttcaaatatttccatctttgttttccatcttgaaagtcttaatgcattagaggctctttccacagacatttcaatgcaagtttgactttttttctctgtatttagtcattcagggcattgagtaagttctagaatgcaatgacaactctagtatagaaccagacacaaagaggtttcttttgtttgtttgtttttctccctttgaaacttatttggtaagggggttttgtgatacccaaatagttcattatagggtgttttcatctcatagaatgggagtggattagactctgagtgagtcaattaaggctgcctgatcaagatgtataaatgatccctgtgggtcagttcatttggaaactgatataataaaatgcaaactaacatttattgagagatcataataacttattatatctatatatgccagggtctggcttaactactttatgatttactatgattaatgatcttgccgaagccttgatttaagatcgtgacggagaggctgttaacatcttaatctaacagtttagaaaagtgaggcttgtcaaggttgcccaaagacacaactagtaagtatagaactggttctggttcaaaacagtgatgcaaagagcaccagaatcatttttggaagcttccctggcccagatgaagtattattacacacacacacacacacacacacacacacacacacacacacatcgctggaaagctcctatcaagcttgggcactgggttcactgataggagatagagaccaaatacctttgtaatgcattctaggggggcagggttggatttgagcctgaccttgtggtgggaacgtgatttgacgcgatgtacgtggagccatacatcggtgctacatgtatcctaaaattccactgtccttggtacaacaagagtcccaaggaaggggttggaccaggcaccttgctaggaaattagcaagttctcagagtctttgaaaattcgatttgggaaacagattcagtagggctggtattttcaaactttctgacagaaagataagatttatgcgtggtctttgtatcagtgattagctgtaggactctggatactcgcttttctggactttcacatctgtcaaatggcatcataaatacttgctccagggccagcactcacgaaatgattgtcgtctaagtgaataaatgagtgaagaaaagtgagggaagccaagaaggaaatagggcatttttaaaagatggatacttgagcaaaggggaaagagaacaacaatgttaatgtggtgttagctgtttgccgtgatatttcctacattctgttcagtagctcttgcctatttatagaacatttttatgtggtgtctcatttagtcctcccagaagtcttatgaagtaggctcttctcttcccttccattcctgttttaccatgagctggctgagggtcagcaatagaagaggctgcctcagcaatccccacccatcccctgcccaggaagtggctgtggtctgacttggagtctggagccttctgcatccatggtgccccactccttggccagcagacatgaatgggtgctttggaaggagttaaatatgcactcccatgtggagctttcagcattgctgcagggtaacctactctctcttcccggagaaaaatataaagaaggcacaaatatcaggtggtttaccttataaattcaagataatgtgttttacttcaaggcacatgctgtgaagtctagtggaaaggagggagattagattttgtgttggggcttctgcatctgaatgaatgcaaagaaaaataggcagagagagaaatgcaattctagcctttggttagtgggaatcgttcctgaggttagctaggatggcattcagcttggctctcaaggtcatgtggaattagatgtattatcaattccaatagtgtatacaggtgtgtgtgggtacttttcagatttacttcctataaaagaatccaatttactgtgactggaactgccttccttctccaaacagaggaatttttgaaaagaaggcagtccacactttggtgaatggcacccaactctgcctccattttcttgcttctcactcattctttggcccgttccagtttggcttctgtccatatctcacactgacacagcccttgctaaaatcaccagtgatttctgtgccactaaattctagggatggttttggcctcctgttccttgagctctcatcagtacttgacactattgaccacacctttctctttgtggcttttgtgattccatatttttctagtttctttttctccacttctgttgccccttctctctccttaatggattcgtccttcttcattatacatattggatgtcctcaaggcttgattctaggccactttatcttttcagttcccattttcttcctacgtgatctcagcttttcccatgacttcattttaccctcctctgggtcccatgcttctctgtactaattaggatagaatgggctccaaattccagcgactgaacaaacacagtgtatttttcttatatgtgcaatgtgttgtgcaggtttggcagccagatataagtgtgactcagggattcaggctgtttccatcttgtagttctgctgtttcagtgtgtggcctttcccatggccccatggtgcatggcagtagaagagagagtgtggagaacccacccacacacaaaaggctcccacctacagccttttggctgcaaacagtcacatggctccaacttaaatgcaagggaagctgtaaatggacatcctcctcctgtgttcctgggaagaggaaagtgaactgggactcagtgaactcctagcattgcctgagacacactctaccttaataagtctagcatagacctctctttagaactccagcccttacatccaattgctctgtggtattttcattcactagcacacctcagaaataactcacacttaaccacatccccaaatgagctcatgacccattcataaaacctgtacttggccaggcgcagtggctcacacctgcactttgggaggctgaggtgggtggatcacgaagtcaggagttcaagaccagtctggccaatatggtgaaaccccgtctctactgaaaatacaaaaattagccgggcatggtggtgtgtgcctgtaatcccagctacttcggaggctgaggcaggagagtcgcttgaacccgggagacggaggttgcagtaagccaagatcacaccactgcactccagcctgggcaacagagtgagactccatctcaaaaaaaaaaaacaaacaacaacaacaacaaaaataaataaataacaataaactaccacctgtcctctctgaatcccccatctcagtgaatagctgagagaagagtcatctgcaagcccatactataagaaacttatcttaccttgacttcctcctctttcagttccacattctgtcaccacctctgtcaactttaccttctatgcacttccatctattctcagggcattcctcatccaagctactgtcccccttcatctgcactctacagtggtctcctaattggtcatctcacttccactcttgcccctgaccagtccattccatacactacaagctagagacgaatctgattggatctcatttcctgcttaaaactctgcaataatttccagcgctcttacctggaccaacgtcttcaacaatcccttttaaaggctcaccaggactgactcttgccatcttctcagcctccctttccatcccttcctcagcccccagaagccccaacattcacccccgtgctcttgcctgaccactcctactcatcctgcagctcagccatgtcctgggggtggtttcttggctccttggtcaggtcctcctgttttatgctcttacagttctgttgcatctttccctcatagcccttatcacagttttaactgcatttaaaaattatttaatttagtaattttatttactgaactattagttccaggagggcagggactatttctgatttattcactttgcacactatcttgcatattgcctagtacatagtagatgctcagtaaatatttgttgtgtgaacttttttctccataagtattaaataatcgctatattaagaatcaggtgaattaaaaaataattcctaccctcaaactatttcagaaaaggggaaaaaagatgccataaacatgatgtgccccaattgagttgaatgggtgttgaaagttacatgtgagagttagcagaggtctggaatatcttgccctagacaacccacactagcaactgaatcacacaactaacggaaagaattgaaatttcttgagggcaggaaccttctctgcttttgctctacatgtcttagtacctggcatactactgtacatataaagaatgcttattaatatagtgaatctactgacatataaataaaaagcctctctagaatgaaaggcttgctagctggaggaaggcagtgtatgagcaagctcttggtcttctcttgtctcccagcacctatgtctgtttggagggtcagagtgaagtattcatcttccttctcaggtcttccagaggcggaacactgggcagctggatttcttcaagcgatggaggagctatgtggaaggctttggggaccccatgaaggagttctggcttggtatgatctcagaatccaggaggctggggctgtggggggtgatttctcccaggacaagctagctaggaggcttagggaagctcaccaccttcacagagaggccccagtggcagggagacagaggactgtgccgagcagggtgttggtgggcatgttgatgggaaggctgtcttgcactctgaacttgttgaaaggtagggtggtcacaggggttttatgctgatttaagctctgcaggatctgcctgcagcctgaagatcttagaagccacagtagtagaaaaaaagttcagtgattgggatgctggtccattactgggaggtcactctagcagtctctaaaattctgttcgtgatgccaggcattatgagcaattttttcccccttttccctctgctctcctctggagcagatgttcacagacagtgaaatagccaaaagcatgaattgggaaatgaagaattaaaaagtcatagttcagatacccagtgtctaataaagtagatgatgtttgtggtttgctcagtgtaaaatctctttggggatcttaggatgagtcgttgacctgctctcctacttggtgagataaatggatgataaatacaactgcttctgttttagaaggatggagccaatggaggcagattccttctggggttaccctgcccccttcactgctcccttccatagaatgtggtcttcgcactccttagtgtgactatgagcccccaaaagagaaagtgctgagactgccccttattagcagagaaggtaaagactaaagtgactttaggttctgaaaacctcagacacacatgttgagtgcttactcgcacacatgggttgattgattattggaattccattttttatttttaggacttgacaagctacacaacctcaccaccggcactccagcgcggtatgaggtgagagtggatttacagactgccaatgaatctgcctatgctatatatgatttcttccaagtggcctccagcaaggagcggtataagctgacagttgggaaatacagaggcacggcaggtgagaaaaaatgttttcttactgcgaaggtctcttgctgtctgttgtgtaaggattggtttgccgtgtgccactgatctgggggatggaatattattctgtggaggtgaattgttctcattgacagtggaggtcctactctctgcagggggtcaggagtgaacaaatagttgaagcaatccttgaccaccataaaattggaattttgtatgttatatgtcatccccccaccccaataaaaaccctccccttgtactcctcttattcaggctgttgtacattagctgatgagcccatattctgaacaatttcttgatgcttgtcagtctttcattcggctttagcagtgtggctgtcatctttgtctgcacagtagtgtgtgtgtgtgtgtgtgtgtgtgtgtgtgtgtgtgattgagcttttggtggcactttgctataaaaacagaataaggaaagtgctgattcaaataataagaagtataggtctcattaatttaattcaactgtgacaacacagaaatgagcagttcagtggaaagtgaaggaacctttagcctctagtagctgctcattggagctaagccagttgctggtgtgtttggttgtgagggaaaagagcaaaattaagcaacatgactgaaatgctggaatgataccagtaaattaaatacattatgtaagagggggaggtgtggtcattgttttaataccaatattttaaaagcggtatttatggcttttaaaccataacaagtgttttgacatttgcctgtgttttgacatttgcgtttttgactttggtgtatttacacaggaatgtgttaccagccagactgaccgactgtataagacatggcggtctctctccttagacttaaatgtaaataggtgaatacaaatagaaggtaacttttgcagagagtcaaataaggggtgagaaacataaacagttacaggagtgtggagaaggtgggcacatggagtacgaagcaactggagggagctggatctgcaaaaaggggcaaactcaagtgggaggaaatagagggctctccaggcctgggggctttagggtgagtagggactgagcagaggcaagaatgctggagtttatctcacagccttgctggacttctcaagaccatgtactcaaggacccctgatggcagaagactgtgaacagaacttctgagtgtctggggccatgatctgggtggccaactatgaatgcaaaccttctttgagatcttataatttcatttaaaaaatagtcacatgaattttgcatttgttcttgtttcccagtgcctatctcagagcctggtacagagtaggagagtttaaaaaatgaaattgctagcaggacttttctatatacataatcttagggatgtttagtatcttacattatagtccctgagacccaaataagttccataggggtgaatgaaaggtgagtttggtgacatggtgacatgggaggggacaaagagggaggggtaggcacctaccagagtatgaggcatttgggctacagacacggggaaactgttccaggattctgagtaggagttgggtgagaaaaagtatgcaaagaattatttcagggaaaagacaatccttgaaaaaaaagcattgcagctagaagatcctcactgcctttggatactgtcacttctttcctaagtagtcctgggtctccatgggctgaagacaggctgtgctacatgtacttgaagtataacatagtcatgcattgcttaacgacagggatacattctgagaactgcattgttaagcatttcatcattgtgcaaacatcatagaatgcacttacacaaatctagatggcagagcctgctatagaccaaggtatatggtgtagcctattgctactaggctacaaacctgtatggcatgttactaaatattgtaggcaattgtaacaccatggtaagtacttatggatctaaatatatgtaaacatagaaaaggcacagtgagaatatggtataaaagataaaaaatggccaatctgtaagggtacttactatgaatggagcttgcaggactggaagttgctctgggtgagtcagtgagtggtgagcgaatgtgaaggcccaggacaggactgtgcactcctgtagactttaggcacactgcccttcggccacactaaatttatttaaaaatgttctttcttcgttaataaaaattaaccttatcttattgtaactgttttactttataaactttaacatctttttcaatttttttgactcctttggagtaacacttcgcttaaaacataagcacattgtgcagctgtacaaacatattttctttctttatatccatattctgtaagtttttttttctatttaaacattttttatttttattttttactttttaaacctttgtgttaaaaactaagacacaaatacacacattagcctaggcctgcacagggtcaggatcatcaatatcactgtcttccacctcctcatcttgtcccgctggaaggtcttcaggagcaatagcacacatggagctgtcatctcctgtgataacaatgccttcttcttgaatacgtcccaaaggacctgcctgaggctgttttacaggattttttttttgtaaagtactcatacactctaaaatagcaataaaaagcatagtattattcacacaaaccagtaacataattgtttattatcattatcaagtattatttactgtatgtaattgtatgtgcaagacttttgtataactggtaggtttgtttacaccaaatcaccacaaacacatgagtgatgcattggtctgcaaccttacgacagctgtgatgtcactaggtaattttcaggtttattgtgatcttatgagaccactgtcgtatatgcagtcccttgttaactgaaatgttcttatgcagggcatgactgtataaaacatgaaagtcagatatagaaaaaggcagttataatacagttgggaaacatagatggacattcatatgattatgaggatattaactgaataagaggggatttaaagatgctattttgtgtgactaagcacactgtccatatcctcccaccccatctctaaatgagatcagactatgttcctgacagcttattccaggttcttccaaccctttggtataatacagtacacacattccagtctgtcccagagcccttgggcctcttcagtccacatggagtccatctgatcatttctttggtttccagtaccctgttgtctgctcttgatcatggccatcggttagcctcagcctttccttctcaggttaaagaagtctacataagctccatgcgtgggaccctccctggacacaatatgaagtgggtgtttttctttggcccgtgtgccccacatctctccctgaaacccagtgccctccctggcctcctggtcaggaacctcactcaggcctgtcctcccgggctgcacatttcctttcccttggccattaccatttgccttttctgaagcctgtgttaaagtgatccagcaaatgaactgatgccaatgggaaagagactgaaagggagtcaacatgtttggtgagttatttaattctcctcccaggtactctgtttgcatgttaactgcaatgaggggataattcctgttctaaggttgttcaggccaacagtgccagcaagtagaggatgtattttttaatagaattattttttaataggagactttcacacagcatttaggcagcgatctagtcttcccatgtgtactatcattcccgcttttaaattctgaattacaatggtagggttagtggagttttagcgttccttatgtacactgatttgtccatgaggagggtttcagaatttagaaagctcctggctactcatgtcttgaatgctgaggcactgtttagaggacacggcattcaaatggaaggtgaatattttgatacctccctgcacgcaccagctctccccagcctctatcttcattttagctctgattagaactggcatgcatgcagcctggcaggaatgtgtggcttaaggcttgctccccactcagactgtccaggtgggccctcaacttttgacttccactcaagttatatcagaaagtccattttcccttcatgaagcaaattccagcaaggtaatgatgtgtaaatttagtttctgattctgagtcttctagtgggggcagggaggctatcttatgagctccaccattaagatgttattcatctatttagagatcataatgcaaacataaagagctaggcattcagaatggtgcagaatgaattctagggctaaccaatgatttacagctgatttcgagtcccacctgcatgggccacagtggggacacaaccagggatggatcccaacctgggggcatttggaaatgtgactggggagctctggaagcatttagtgggttgggaccagggatggatttttaaatgctggcacctgaaaaagaaaaaaaaaattaatgggtacctggatgaaagggagagctagaaatggcacaaatcatttgtaatcatccattcctaatcctgaaataaaagacattcaaggttctgacacacactactgtgtctgtgtgtgactgacaggggatgcgatgttaatggcttctcctgatctttgaaggttcagctgcctgggccatctttcccaacctggtgaatcctagagggggagagtgggcctcagagggacattttgatgagatggatggtgaccaacttgatcccctctgagtttgggcacagacctttcatgggcctgccatgaacccctccagtcctcattctcactctctacactctgaacattaggatggcttcagtttctagaaggtagaaaatccttctgcagaaaaagacctcccacatttgggtgaaaacctgctttacctttctttatcccagtgcccaggtttagatcatcacaaacatgtctttaagagagcctctgcacagattcttagaaagcagccctgggaaccttctatgtaaattagctaagctgtgctcatttaaagaaggttactaagggagacactgcacgttatttcaagctgtggttaactttctgtacaaagtctagagggaggcggaaatgtgtatgactagcatgacaatatacctttcttggattggagaaaactactggagacagacctgtctgctgtgtttgcgtggaagtggcctccgtggccccagaatcctcctgctttttctgggtgaggcataaacgagctgctggtgagattgcagacttggagggggcaaattaggaccttcccttttaacatatgctaccaactctgcatattcaccccacccactccaaaaacgtttttgagagcaaggaccttcttatttttgtgttcacagagccaagcatgtgctgctccatagcaggtattcagtaaatgttccctaaaaaacaaataagtgaagttgtagaccagaggttctcacactgtagcctgcgtcagatcatcggaagggcttgtcaaggcataggttgccggggcccaacctgtagtttccggttctgtaggtctgggctggggccaaataatttgcatttcttttttcttttctttttttttttgagatggagactcactctgtcacccaggctggagtgcagtggcacgatcttggctcactgcaacctccacctcccggattcaagcaattcttctgcctcagcctccagagtagctgggactacaggtgtgcaccaccatgccaggctaatttttgtattttcagtagagacggcgtttcactatattggccaggctggtcttgaactcctgacctcatgatctgcctgcctcggcctctcaaagtgctgggattacaggtgtgagccaccgtgcctggcccatttgcatttctaacaagttctcaggggatgtggatgctgctggtctgggaaccccacttgaagagccattgatagatagctctctcttgctagcgtgcaagaagccccccattgaaacaaggaaggcataggtggattggtgtctcagaaagaaccctggacttggaatctcaggacagagatttgagtcccagctctgctgtttgtggacggtgggaccttaagaagttcctagagtctaacctttttgaatttgtttccccacgggactaagagctgccctgctcacttcacagggttgctgtgagagtgagatgagaatgcacatgcgaagaagatcgctaaacttagagctgagatataaatgtaagaatctttattgcaggaacagagcttgatgaagcttgtgattgatatgggcccttattgccttttatgagcagaaaaagaaagcttgtaaaaggatgaaaaatatgatagggaaacaggagatacataagcaaaataattaaagcagttttccagatgggatgtaatgaaggactgaattttacatgtgtctccagaagggctctggaagttcaggagtgtttgtgtgtaggtgtgtgtgtgtgtgtgtgtgtgtgttaggagggtgcatgggaagaccaataaagagaatcttctttagaagtggccttgagctaggctttgaagggatggttgggatttggacagatgagggcagagagaaatctcctggaaggtgggctggtccacagtggagggtgtgtggtggagatggtgggatgcaagactgtgcatagggcacaaccaacctacaggcctgcaaggcatggaagaggaattcacctccacgtggtatgaagtagactgttaggcctgagatgatgaaaatggacgtctaaactccagaggggctggcaggcaagaagccagagagaaggctgttttgttaacacagacccaggatgagagaaggccgagggtggctgtcatgggagcagagacataggggtgtatgtgagtgacctgcagagggagggcttgagaagaggtatgaagggattgccaaacatggctccaggttccaggtctgggtggtgtggagaagggtggacccaaggcagagtggggagagtggagagtggtgctcttgtgtgtggtgtggtcagggacttggggagagttgttatgtttggatatttgatctgactgtggagcttccaagtgaaaatgctatgagaactgttggagaaacaggcctgaagttggggtacaggccaggaaagacagcttgttcccatgtgtcatgttcccatttgggctgttttgagagagcggtgactacctgtgacatgactggctgcatctttggcattttcatgcctagagatcttcctgctgggtcctcttttgatcatctcctcggtggctaaccctgggctctcgcctccgtctcttctctcctgcaggggatgctcttacttaccacaatggatggaagtttacaacttttgacagagacaacgatatcgcactcagcaactgtgccctgacacatcatggtggctggtggtataagaactgccacttggccaaccctaatggcagatatggggagaccaagcacagtgaggtaggtgacaggtgaatgtcttttctgtcccagggtatgtccatattcagcttccaaatggacaccctccaggccagtctggcagcccctctccttctgaagcttccagtcaaagcagtagagcttctcctccaggctccatggccttgaggtcgtggcctcccttcctgatggccatggccctgcttgttttgcattcccagagctgcacacttgcctaggggaaggtgcgggaaaagcttgggctgcccactgccatgtaatgacagatgatgtgctctgcacgctgtctcattttactagttcacacactgtcagctctagctgctgtaacaaaataacacagaccaggtggctcaaacaacagacatttatttctcacagttctggaggctgggaagtccaagatcagactgctggcagatttggttcttggtggtggaccttgctggcttgtggctgtgcgtcctcacatggcggacagaaaggagctctgatctcttcttcatataggggcatatgtcccatcatgagggctccacctcatggtctcatgtaaacctaattaccttccagaggccccctctacataccatcatgttggtggggggtggttagggctttactacatgaattttgaagagacacaaacattcagtttataacaaacactgcctactttctagttgttctcctagttgaacaagagctatttctttaggctgagcatggtggttcatgcctgtaatcccagcactctgggaggctgaggtgagctgattgctcatgcccaggaatttgagaccagcctgggtaacatcgtgaaaccctgtctctacaaaagatacaaaaattagctgggcattatggcgtgcacttgtagtccctgcctctagggaagctgaggcaggaagatcacttgagcctgggaggttgagactgcagtgagccatgatcaagccactgcactccagcctgggtggcagagaaagaccctgtctcaaaaaaaaaaaaaaaaaaaaaaaaaaaaagctgtctcaagtcctttgatcaccaggaaaacagtcttttgtgccttaggtcagacctactcttggatccacttcacccaaaaccttcccagaacattgagctagaccagtctctccacattgggagtgtgcgcccagggcccaggggtccaggagggctcctcttcccacattgccctgaaactgtcccacccgctatttctcaagcctcctctgccccagtgcatcatcctgactctttgacagctgcggggcacttcccacctgctccctcacagtttcttgaaaattgcatctttgtctctgctcgtcattaatcctctcccctccacaaaccctgagtccccatcctaggtttctaatttcccatctgcagccctgatcctaagcctccaggaagccacctcttcagaactcaccttgtaccaatattactgtaaatattagcacatccgaagtccaggtacattttgattactttggccctgaccagtcttcgggactcccaatctttatgtgatttttcaaagggaagaagaaatttgcccccagggaagctggggagggtgggcccatgaatcatggtggcagcgtgtgggctgactcagggaagccagggataggagatcaaatattggaaacgagcagccaggatgccctgaaccatcccatatttgctaataaaagacattcatctgtttaatgcgcttttcacagtctgcaaggcatttagcttcttgtttattatttacctcacaaattaaaatacataaaattggtcacttgggctttttattggccaggttgcagggttattaagtgaattaaatattattgcgctcaccagtcaaaagaaataaaatgaaatttagttttcagcaggctatttgttaccccagagctaatatctaaacagtctaaattgaaaatgattttacacaactggccaattaatatgtttatttttgcctttaattttttggaaaggaaaagagtgaaggaaagataatttgcccattgccggcccggttgacccctgtgttgtctctgtggctgctctggcctcacccagctcccgggctcacacccccttgctcccaccatagagaccgccagcttccaaatcgtccaagtcctctcagcccgtctaaccccagctgcccagcagagggcgcgtgtgtccggatcctgccctcccctcccttctcatcaccccgtctctttctctctcctgagcagagagggagtggtttcactggtaattaattaattaattaattcctttgtaccataacccaccctgccctcctcctaagagcctcttcttgatgtggcttttttttttttttttggtagggggtgaactgggagccttggaaaggacatgaattctccattccttacgtggagttgaaaatccgccctcatggctacagcagggagcctgtcctgggcagaaagaagcggacgctgagaggaaggctgcgaacgttctgatggcccgtgtgagcagtcctcgcaggagacaccaccagctgtgggagcttggggcggggtgggtagtggtcactgcggtctgggagtgctcagatagcccgcagaacaaatcatgtcaccaagcttcaagccatggaggttccttccctctcacctgcatttttgcccgtctttatgagggtcttgaaaatcaaaatagtagttgcacagtatgtgtaggaaagacagtactggaacggcaaggtttctcagcttatcttcagcaacatatatactggattagggcaagagaaggaatcacccagcacttcaccagttggaaatctctggaaatttacatctatgtatttaaagttctgctaatgcaaatcttttctctggaaagaagcacagaggaggagttctgatgacccaggggttagggctgagacaaccggacgtttgtcacctcctttcccattgggtttttaggaaaacagtgtgaacctcccccttttaatttctggtgttatgaggaagaataaaggggataaaaggggctaagatggactcatgtttagctaagttctgacttgtatccagcatgctggagaccaaagctgccgccttactgctatttttaagtgccctcttttcagtcatttgcataattgcgtccatagagctgcatatgttgtgaataaattctcactcatttcaactttgaataatttgactgtcttgataattggttcctcccaaagactcttctgcaactcccattcatgcccaccaggcctcagactccctcttttccccgccctgcactattggagccctgggttttgtgggagtgctcagcaccgtgagtcttactgtttgatcggacagttagcaagatcagatcctttttgcttattttctatcactttggagggttttctgtagcaaaatcagtgaccaatgaagtaacttaaattcctattgaagaaaaaaaataataaaccacttgatttaaaaaaaaattgccatgtgttattttcctccacgtaagtgcacttgaattctaaatttaacctacatgcaagtgaaggtacaattcgtgcattgtaatggaatttggttggctgtggactctgatttgcatgatgggaaataatggtatttagaatgcagaagtgagtgaatgggaagtaaggcgaatgctccaaaagctgccgtacccctccaggacgagggtgtagtctattgcctagatgtctccaggttttaacctctgggtgaatgtcaaaccatacccctgaaaccgtttctgtcaacctttaaagtcttcagcatccccctctggtgccttccttccccagacacacacattgagcaatgccatggtaactgctcgctctgataatgagtggtctcagtgaaatacagttttagtgttgatgctgacgatgaaaaaatgtgcttgcatgttattaattgattcaacaagagtttgttgtttgctttgtatcaagcagtgtgctgggcactggggaaacaaaggtgagcaagatagacactatccttgtattgatggagcttgtgtgctgtcattcattcattcgtttacattcactcattcaacgaatagagatgaagccctattatgtgccaagttccattctaagcattggtgttaatcaaggacataacatcatattcctgtccttgtgctaatattctcatggtggaggctgacattaagcaacaaataaatgtgtggttacaagaagtgggaaatgccgtggaagaaaaggtaggatgagaagatgaaggtgttgcatggtgttggactatgaagcctctctgaggaggagatgtttacagaaattgaccaaatttctcctagtcttgatctaactttatcagggcctgagcctgagctaatttctttgtctgcctttttttttttttttgaatggggtctctctctgtcttgcaggctgctgtatattcacatgatcaaggctcactgcagacttgaactccagccttgaactcctgggctccagcaatccttccgcctcagcctcctgagtagctgggactacaggcacatgctactgtgcccagctaattttttacttttttgtagagatggagtcttgctatcttacccaggctggtctcatctgtcttaaaggtctgtctgcacaacttcccagttccaagtcttctcctcaaattctcttcttttaaaaacatttttgtagttttttaattgttttatttaatagaaatggagtcttattgtcacccaggctgtgtgaggaaaacagtgtaaatctctcccttttaatttctggtgttgtgaggaagaatatagggaataaaaaaaggcgagtgcaatgtgtgaccacagctcattgtagccttgaattcctggactcagcaatcctcccgtctcagcctcctgagtagctgggactgcaggcgagtgccaccatgcccaactatacatctatatctatatctttatctatatctatatcatctatatctatatctgtatctatatgtatatcatctatatctatatctatgtctatatctatagatatatagcaggctcttgctatattgctcaggctggtcttgaactcctggcttcaaatgatcctccagccttgactcgggaagtagatgggactacgggtgctagccgccgcacctggctggaattcccttctgctgttccgtgaccccgtttgcatgtggggtactcagcttcgtaattatgaagctttgggctcatcacagtgatccagggtttttagaaaagtgcctcctttgcaaaatggattaaatcccagaaattgacttcgagccaaggatggtgattgttggcaatgcttctcaactttgaacatgcttgttaacacagagatcacggggtcccttccccagacgctctagttaagtaggtctgggccgagggctgctgctggagtggtgtccactctgagtagctgtggtgtgggggagccgccggtggtctttttgctctggaggagcctgtgatggtagcaaattacaaaacacacacccctgtgttcattgaccccagggtttctccaccactgggcaagaggaggacttttgggaaacaggagctatttcttacattattttgcctgtaggacccatggtgcacaaaggagcgggtgaagaaaacctcagctgacccttcaaaggttctactggggaccaggaaggaagttgagagaaactcattttcaaagggcctctgtctgactgaggaaaacattccaacttgaaacttccatgcctaacctcattttaacgtgaccagtgctcacaacttccaatctggtagctgaatatgggcccgtggaatgggtttctggatagacctgctttttagagagagtcaattttcttagaaccaggttatgagccatcaaggttttgaagcttacagggacgatttctaccctttagaacaaactaaagcaaacaaaagctctcatagaaggcacaggctgcaagccaggcactagggtagatgcaaagacagaagtcttggtaaagtttccaaagtgttgccttttatgcaggacatgagcaagacagtgataaacagaacacaaatgtggccttccagcagctcttggagtggtggcagaggcagccatggaaacaaactggggagagtgagtccacagggaggtggactgaacactgtgggcagagtcagggtgactcatcctgccaggggtgccaagggagagagcttcacggggatgtgatgtcggctttaagtctggaaggatgagttctggggggagaaaaaagaggcccaagaggggtggggcccatcgggtacaggcgacttggcagcaaggaagagaaagtgtggagtgtggcatgtctgaggggggcaaagtggtttcttactggggtgaggagagcttggtggggagccaggctggtgagatgagtggggattcttcctttgccaggccagtactgaggttctcagcgctcactacctgtcggcggcggcagggggcctccatgggtacagaagctccactcccctcaacgggctctgctccagtgggtctcaggtgagttctgtgcacctgagcttcctaaagtgcccccaaggattccaacatagaccacgcttgagagccactgctcagatgaaagcatgtggaaagtggggaacacacaggtttttaaacctgagagtgacaaggtcagatgtatatttcggaaatatcagtctggtgataggatagacaacagggctgggggtgttgagggaagttttggaggaaggatagggactcacaggcaagttgagtgctattgtgatagttcaggcaagcggtcataacttccttggcctgtggcagaaatggtggagaaggggaggagggtctagattagtgagatatccaggaagaaggaatggtgggctttgaggaggatgggtggtacaggcaagagatgggtcgtttcatgtcagagcttagagctggttgttcctgacagtggcttcctctgggaatagggtcccagagtttatgtttgtcaaatgagatcaaaagctctgcgtttaaaatttgaattctcagggatttaaagatgattaaagccaggaaatgctgaaggagctgaggagaaagatagaaaatgcctccagaaattgtgattgaggaaggaaaaaggccaggtgtggtgtgtgaggagatgtggacaggggacatgcagatgaagggatggcatggcagaaggaaaaacaagtataacagcgagaaactcttggtgaaatttagccagttgatggaaaaggccctccactaatcccagctacgccggaggctgaggcaggagaatgcttgaacccaggaggcagaggttgcagtgagccgagattgagccattgcactccagcctgggcaacaagagcgaagctccgtctcaaaaaaaaaaaaaaaaaaaaagaaattccaagtcattacctcaagcgcttcgctagggtggtggaggggatcaggagggagttcatgtcaatacggagctgatcaatacggttgggaccgcagcttagtgcaagaggtttgctatattcagcctggccaggagatggcagtgttgtcctgtcgggagcctctcatttcagcgccacttctctcttctataaaggggagttctgggggctaggtccccacttttctcttttcctgggtgatgctatctggagagtcagtcggtgaggcccagcttaacattgggcctgcacttggtggtttcttaggcagcgttcttgctggacaaatgcgcaaaaaataactgggaacaaccttgaggagattgcttggtgagattggactctatccccagacccggcgcactgggctgctggggaggaaaggcggatagaggttgtcagcctgatgaaaggtgaaggggggcacccctgggagagatttcaggcagctcctaatttgcaaatgaattcacttctccaattccttctgtcagttggctgtttctgtgggtgaaattatttgagttccaattataatgttatataaagaaggtaggttctcaggttagcccataaaactctgtttactctacaatatagatgagttgcagtgtatgtataatgaaaaataggaaacaacagtattgcggtactgtaatttaaataaaagaaagaaacaaaatggaatggaaacagttctttattttggtgagtgaagaaaattaggttgaattagagaaggagaaggaggcagatgaggcttgctgtgggacatataaaggaggcatttgggcactttaaaggcttatgggaagacccttgattgtgttctgtaagtttccaactcaagggaggggcgtctacaagttcaacagtctttgaggagccaagatcagattggcctggatctcgatgcctggtgtgcagaaggaacactggggtaggagtctgaagacttgggtttctattccagttttgggtaaactggcttaccttctctgggcctcattttcttcatttataaagtgagaatcaagtgaaataatgaaagtggtttttatgtacgaaggcactctggaatggtaaaatagtgggcttggatcttcagtcttcatattttcatttaaaactttttctttttttcttttttttcttttgatagagatgtctctttagcagctctaaaacatatttgctatgaatagccaccaacaggattattatgggttgcaaatggaagaaagagaaagggaagagtaaaagagaaagggaagagtaaaagagaaaggttcataaaggttagtgagaatctgtgtacactgcagaaacagtttcctctggagatgacattgactgagtctgtagtggaagtcaggagcagaggaagcgtggagtgcgcactagctctctatggaagacgggagcaggggacgcgtggagcgtgcactagtcctccatggaagtcaggagcagagaatgcctggaatgcgcactatccttccatagaagacaggagcagaggacgccggagtgcgcactagccctccgtggaagacgggagcagaggacatcggagtgcgcactagcagtccatggaagtcaggagcagagaatgcctggagggcgcactagccctccatagaagacaggagcagaggacgtcggagtgcgcactagccctccatggaagacgggagcagaggacggtggagtgcgcaccagtcctccgtggtagacaggagcagagaatgcctggagtgtgtactagccctccatggtagatgggaggagagaatgccaggagtgtgcactagccctccatagaagatgggagcagaggacgcgtggagtgcgcactagccctccttggaagtcgggagcagaggacgccgcagtgcgcactagccctccatggaagacaggcgcagaggacgccggagtgcgcactagcccttcatggaagacgggagcagaggatgcgtggagtgcgcaccagccctccatggaagtcaggagcaaaggatgtgtggagtgcgtactagccctccatggcagcatttcccaaatggtggcccctgaatctttgttcctccagatgtgctaaaagaaaaagaggcttgtggttaaataaatttgggaaaattttaaggggagttaaaccaaattctttattacagcacctgctagaaactttaatgtgataaatgcgttgcagatcccaagggggtgaagtgggaaagttatactatgcagtgtttgcaaacttatttgaccgtacacagttcttttgttgttttgatagtatttctcaaggtgtggttcagggaccacctgcattgacctggtgtttattagagcaggttgtctggcatcaccctagacttaataatcagccagaagggcagggagagacagggaatttgcatttttaagaaacacctcagtgtttatttcccccaatcaacacatttatttagcatatagtatgtgccaggctccatgctaggtgttgaagatatactagtgaataagacagttctaattctaatctcataaagctaattctaatgggggtcaaaataggggtggggtgctgggaatagaagcaacacacaattgcaatgtggtctagtcttactgcaatgggcaagacttgtgtggttagggaagctttactgtagtgaggctatatatagaacacttcaccaaaatatgtttgtaacaacagttgagacctatgatttatggaaatcccccatatgtcacatgagcacggcattccggaccctgacagatttgtgaatttcacataaaacccggtgactcttttgcacatttaatttgagaacaggtgaactagctagatggatgttctccaggaaacacttctaaggtgaaaaagatgttgactcacgctttctcctgatctggccaccaggtggcactgacaagctggggcgacttcgttgtgggcagaggcgggacagataattaggcagccttgcctaatctgcaaatctgcagaccttaatccatggagtattggtaatcctgtagatagtgcagtatgtggtgaaattagggaacacatcacaccatggggaatagaaaatgctaattattttcaatccctatctcattcgatttgcctgcatcatttgactctatggaccatcactttcttcttggaaatttcttttcctttggttcctaggacacagctctctcacggttttccttcaacccttaataataataagtaacatttattgggcacttaatataagccacgtcctgtgctaaatgctttgtacacacgatcatttaatgctccctatgaggtagctactctcattagctttatttagcaggtaagtcttacagagagattaagccatgggtccaaattacataactagtgagagtcggagttagcatcagggttgggacaaccctagtcatgagtcctagctcactgcacttatggcttccagagagccctgatggtttctgaatcgtccccatcatcctgtctgcttgcatcactactccagggtgcacttgcctttgtagactgtgcagctggggccctcctttctcagtttcttcctgtgcaagtctctagacacctcctaggcgatctcccccggcctgtcctgaagccagcctgggagcttccctctaaggaagcaatggccacactgtcttgtcatggtttgcttgtctgtgcccccctaccaggttctgagcccctctaggacaacttagtatcactggcacctagcgtgcttggcatatagtaaacagtcagaaatgttaatgggatgaacagcctcaaaagagggctggaggtacacagtcacagccattcctgaagaaatatagtgtgacattgcccacacaggtgtttgaaaacaaccctttgagtctaagacagaaagcgggttgaagggatttttttccagtccagtaaacctgtgactttgaattgggaaatactactaaggtcaacgggcaaggggccagtgcagagtgctgtgataaactgagaatgctaaggacgtgatggcattcattgtccaaatccatattataccccaaggccaggatggagccggggcaggtgcggctgcaggcattgagcactggcatcccctcaggggtgcagcagctgctcccctcccagatggtttctgagcatcagttcctcctctgcaccagaatgtttagcaatgtcctgggtggatgaacaaggagctgaatgaagagtctctgttctctggttgtcatgagtgtgtggtgatggggaagggagcccaggaatgaactcatctgaactacagacataacctgccttgggcgagataaggcaaagagtccacctgtgctctaggccttccttcttaagccctccttgaaatccagtcagcatggctgtttttcccaggtgtctgaccctgcccccaagatcatagacctatgctgtccaggatggcagccgctagccacgtgtagctactgagcacttgaatcgtggctggcatggccaagcgcagttgcccatgcctataatcccagcactttgggaggctggcgggtcacttgaggccaggagttcaagaccagcctggccagtatggtgaaaccccatctttactaaaatataaaaaaaattagctgggcatggtggcacatgcctgtcatcccagctactcaggtggctgaagcatgagaattacttgaactcgggaggtgtaagttgcagtgagccaagatcataccactgtattccagcctggatgacagagcaagactccatctcaaaaaaaaaaaaaaaaaaaaaagaaaaaagaaatatggcagacatagctgagctagtatacctttaattttatttcattgcaatgaatttaaatagtcacatgtggctattggtaccatattgaaccatattgaacagtgtacacacacttacacacacacatacacacagtttttgccctagtggctactatagaggtttttgatccctcctttcccaacaaacactggatttaactcaaaggtccattcttccttaggtttttgctatttccccccttttcctttaagaagccattgatggacctcattgatggaaagttctgtaagtgttgccaaggaacatcagtatatttttcctgtagctggcacctttgagggagtctggtctccaaggccatctgttttgcaagcaagggtgagacagccacattcctcatcctcagacctatgactctaccatggcgaaggcggtgaccagggagggctgggacatttgtgtcacagaaagagtccctgcattgatcatttctgagtgatgtctgagtgggggtaatacctaatgttaagaaagtaaccatctgactacatcaagacttttcattttcaaagtattttatttaaataaatttttcttttgtgtgtgtttgaattttacagaaaaaaatactgacaaatactatacagcttggaccctttatatttttcttggaaaggtggctgccatttttctacctttctccctccctgctccccccaagaaaaagaaacatggaatccattgagcaatggggaaaggagcaatggggaaaggcctcctctggctgccgtccggagcctggctaaagctgctcagaagtccaggcctaggggatgtctttctcgagcctgtgctggtctaggaagcctcttctttaggaatcatttttttgtcccccgtgaacttaccctccccagatgagtcaagcagtctctggtcctgaggtcccatgggttgccagtggcagttcagggacagaggctggaaggagtgaaaatggagaggaataaagggctggggctggtctggtgcaggcagaagagggaatcagagaagcataaaacatggagaaaaagatgagaag

SEQ ID NO: 1708 - DNA, 4874 bp, Homo sapiens
atgttccgcttccctatggggctcctgcttggctctgtgctcctggtggcttcggccccagccactctggagcctcccggctgcagcaacaaggagcaacaggtcactgtcagccacacctacaagatcgatgtgcccaagtctgccttggttcaggttgacgctgaccctcagcccctcagtgacgatggggcttcgctcttggccctgggggaggccagggaggaacagaacatcatcttcaggcacaacatccgccttcagacgccacagaaggactgcgagttggcaggcagtgtccaggacctcctggcccgggtgaagaagctggaggaagagatggtggagatgaaggaacagtgtagtgcccagcgctgctgccagggagtcactgatctaagccgccactgcagcggccacgggaccttctccctggagacctgcagctgccactgcgaagagggcagggagggccccgcctgcgagcggctggcctgccccggggcgtgcagcggccacgggcgttgcgtggacgggcgctgcctgtgccatgagccctacgtgggtgccgactgcggctacccggcctgccctgagaactgcagcggacacggcgagtgcgtgcgcggcgtgtgccagtgccacgaagacttcatgtcggaggactgcagcgagaagcgctgtcccggcgactgcagcggccacggcttctgtgacacgggcgagtgctactgcgaggagggcttcacaggcctggactgtgcccaggtggtcaccccacagggcctgcagctgctcaagaacacggaggattctctgctggtgagctgggagccctccagccaggtggatcactacctcctcagctactaccccctggggaaggagctctctgggaagcagatccaagtgcccaaggagcagcacagctatgagattcttggtttgctgcctggaaccaagtacatagtcaccctgcgtaacgtcaagaatgaagtttctagcagcccacagcatctacttgccaccacagaccttgctgtgcttggcactgcctgggtgacagatgagactgagaactcccttgacgtggagtgggaaaacccctcaactgaggtggactactacaagctgcgatatggccccatgacaggacaggaggtagctgaggtcactgtgcccaagagcagtgaccccaagagccgatatgacatcactggtctgcacccggggactgagtataagatcacggtggtgcccatgagaggagagctggagggcaagccgatcctcctgaatggcaggacagaaattgacagtccaaccaatgttgtcactgatcgagtgactgaagacacagcaactgtctcctgggacccagtgcaggctgtcatagacaagtatgtagtgcgctacacttctgctgatggggacaccaaggaaatggcagtgcacaaggatgagagcagcactgtcctgacgggcctgaagccaggagaggcatacaaggtctacgtgtgggctgaaaggggcaaccaggggagcaagaaagctgacaccaatgccctcacagaaattgacagcccagcaaacctggtgactgaccgggtgactgagaataccgccaccatctcctgggacccggtacaggccaccattgacaagtacgtggtgcgctacacctctgctgacgaccaagagaccagagaggttctggtggggaaggagcagagcagcactgtcctgacaggcctgaggccaggtgtggagtacacagtgcatgtctgggcccagaagggggaccgagagagcaagaaggctgacaccaacgccccgacagatattgacagccccaaaaacctggtgactgaccgggtgacagagaatatggccacggtctcctgggacccggtgcaggccgccattgacaagtacgtggtgcgctacacctctgctggtggagagaccagggaggttccggtggggaaggagcagagcagcacagtcctgacaggcctgagaccgggtatggagtacatggtgcacgtgtgggcccagaagggggaccaggagagcaagaaggccgacaccaaggcccagacagacattgacagcccccaaaacctggtgaccgaccgggtgacagagaatatggccactgtctcctgggacccggtgcgggccaccattgacaggtatgtggtgcgctacacctctgccaaggacggagagaccagggaggttccggtggggaaggagcagagtagcactgtcctgacgggcctgaggccgggtgtggagtacacggtgcacgtgtgggcccagaagggggcccaggagagcaagaaggctgacaccaaggcccagacagacattgacagcccccaaaacctggtcactgactgggtgacagagaatacagccactgtctcctgggacccggtgcaggccaccattgacaggtatgtggtgcactacacgtctgccaacggagagaccagggaggttccagtggggaaggagcagagcagcactgtcctgacgggcctgaggccgggcatggagtacacggtgcacgtgtgggcccagaaggggaaccaggagagcaagaaggctgacaccaaggcccagacagaaattgacggccccaaaaacctagtgactgactgggtgacggagaatatggccactgtctcctgggacccggttcaggccaccattgacaagtacatggtgcgctacacctctgctgacggagagaccagggaggttctggtggggaaggagcacagcagcactgtcctgatgggcctgagaccaggcatggagtacatggtgcacgtgtgggcccagaagggggcccaggagagcaagaaggctgacaccaaggcccagacagaactcgaccctcccagaaaccttcgtccatctgctgtaacgcagtctggtggcatattgacctggacgcccccctctgctcagatccacggctacattctgacttaccagttcccagatggcacagttaaggagatgcagctgggacgggaagaccagaggtttgcgttgcaaggccttgagcaaggcgccacctaccctgtctcccttgttgcctttaagggtggtcgccggagcagaaatgtatccaccaccctctccacagttggtgcccgtttcccacacccttcggactgcagtcaggttcagcagaacagcaatgccgccagtggtctgtacaccatctacctgcatggcgatgccagccggcccctgcaggtgtactgtgacatggaaacggacggaggtggctggattgtcttccagaggcggaacactgggcagctggatttcttcaagcgatggaggagctatgtggaaggctttggggaccccatgaaggagttctggcttggacttgacaagctacacaacctcaccaccggcactccagcgcggtatgaggtgagagtggatttacagactgccaatgaatctgcctatgctatatatgatttcttccaagtggcctccagcaaggagcggtataagctgacagttgggaaatacagaggcacggcaggggatgctcttacttaccacaatggatggaagtttacaacttttgacagagacaacgatatcgcactcagcaactgtgccctgacacatcatggtggctggtggtataagaactgccacttggccaaccctaatggcagatatggggagaccaagcacagtgagggggtgaactgggagccttggaaaggacatgaattctccattccttacgtggagttgaaaatccgccctcatggctacagcagggagcctgtcctgggcagaaagaagcggacgctgagaggaaggctgcgaacgttctgatggcccgtgtgagcagtcctcgcaggagacaccaccagctgtgggagcttggggcggggtgggtagtggtcactgcggtctgggagtgctcagatagcccgcagaacaaatcatgtcaccaagcttcaagccatggaggttccttccctctcacctgcatttttgcccgtctttatgagggtcttgaaaatcaaaatagtagttgcacagtatgtgtaggaaagacagtactggaacggcaaggtttctcagcttatcttcagcaacatatatactggattagggcaagagaaggaatcacccagcacttcaccagttggaaatctctggaaatttacatctatgtatttaaagttctgctaatgcaaatcttttctctggaaagaagcacagaggaggagttctgatgacccaggggttagggctgagacaaccggacgtttgtcacctcctttcccattgggtttttaggaaaacagtgtgaacctcccccttttaatttctggtgttatgaggaagaataaaggggataaaaggggctaagatggactcatgtttagctaagttctgacttgtatccagcatgctggagaccaaagctgccgccttactgctatttttaagtgccctcttttcagtcatttgcataattgcgtccatagagctgcatatgttgtgaataaattctcactcatttcaactttgaataatttgactgtcttgataattggttcctcccaaagactcttctgcaactcccattcatgcccaccaggcctcagactccctcttttccccgccctgcactattggagccctgggttttgtgggagtgctcagcaccgtgagtcttactgtttgatcggacagttagcaagatcagatcctttttgcttattttctatcactttggagggttttctgtagcaaaatcagtgaccaatgaagtaacttaaattcctattgaagaaaaaaaataataaaccact

SEQ ID NO: 1709 - protein, 1290 aa, Homo sapiens
MFRFPMGLLLGSVLLVASAPATLEPPGCSNKEQQVTVSHTYKIDVPKSALVQVDADPQPLSDDGASLLALGEAREEQNIIFRHNIRLQTPQKDCELAGSVQDLLARVKKLEEEMVEMKEQCSAQRCCQGVTDLSRHCSGHGTFSLETCSCHCEEGREGPACERLACPGACSGHGRCVDGRCLCHEPYVGADCGYPACPENCSGHGECVRGVCQCHEDFMSEDCSEKRCPGDCSGHGFCDTGECYCEEGFTGLDCAQVVTPQGLQLLKNTEDSLLVSWEPSSQVDHYLLSYYPLGKELSGKQIQVPKEQHSYEILGLLPGTKYIVTLRNVKNEVSSSPQHLLATTDLAVLGTAWVTDETENSLDVEWENPSTEVDYYKLRYGPMTGQEVAEVTVPKSSDPKSRYDITGLHPGTEYKITVVPMRGELEGKPILLNGRTEIDSPTNVVTDRVTEDTATVSWDPVQAVIDKYVVRYTSADGDTKEMAVHKDESSTVLTGLKPGEAYKVYVWAERGNQGSKKADTNALTEIDSPANLVTDRVTENTATISWDPVQATIDKYVVRYTSADDQETREVLVGKEQSSTVLTGLRPGVEYTVHVWAQKGDRESKKADTNAPTDIDSPKNLVTDRVTENMATVSWDPVQAAIDKYVVRYTSAGGETREVPVGKEQSSTVLTGLRPGMEYMVHVWAQKGDQESKKADTKAQTDIDSPQNLVTDRVTENMATVSWDPVRATIDRYVVRYTSAKDGETREVPVGKEQSSTVLTGLRPGVEYTVHVWAQKGAQESKKADTKAQTDIDSPQNLVTDWVTENTATVSWDPVQATIDRYVVHYTSANGETREVPVGKEQSSTVLTGLRPGMEYTVHVWAQKGNQESKKADTKAQTEIDGPKNLVTDWVTENMATVSWDPVQATIDKYMVRYTSADGETREVLVGKEHSSTVLMGLRPGMEYMVHVWAQKGAQESKKADTKAQTELDPPRNLRPSAVTQSGGILTWTPPSAQIHGYILTYQFPDGTVKEMQLGREDQRFALQGLEQGATYPVSLVAFKGGRRSRNVSTTLSTVGARFPHPSDCSQVQQNSNAASGTIYLHGDASRPLQVYCDMDGGGWIVFQRRNTGQLDFFKRWRSYVEGFGDPMKEFWLGLDKLHNLTTGTPARYEVRVDLQTANESAYAIYDFFQVASSKERYKLTVGKYRGTAGDALTYHNGWKFTTFDRDNDIALSNCALTHHGGWWYKNCHLANPNGRYGETKHSEGVNWEPWKGHEFSIPYVELKIRPHGYSREPVLGRKKRTLRGRLRTF

SEQ ID NO: 1710 - DNA, 70931 bp, Mus musculus
  misc_feature (1)...(70931): n = a, g ,c or t
atggcctggttatttctgtagaaccgggtgggaactggaattttagtacagggcaggaattggtgatgaggtttggtgtctgggtcattgatctcatcagcaaaaggctcagagaagccttccaggtcccctgcagctagaaggcctggaagccacatgtgccatggaagtcggagcatagaaggaaggtgacttgatggcctcttactgtgttgagaaaagaaaaattgtttcttcctttgctttcccctcccaactcaaccagtcttgttttagaggaaaccaaagtttggccattgtaatctgccctgctaattcttatacaaacaggaaatagagcagagttcagcagatgaaatcctggctcttccctcaccagctctgtccccttaggttgcatcacttctctgagccctggtgtcaactcctaacacagagatgacagcagcagcagcagtaataatcgtcatcccctgcagagggtaaactgttggtagatgttagctaatactatagattacacaagctttgtttgtatgggataaatccagtaagctgccaaaccagtcagtttcctgactcgtggatttgtgttgagttcactttggcacattcaatctatgagtctacaagccacagctgtaactggaggactagctccagttgtacgtgttatacctgagtctgggtgctttgttatacatgccagtgaacagaaatgatgttaaatctttaaactgtactttagttagatcctggccatctgagaaagtgataggttaacaccctgatgaaacccaacgctaccatctcatctttagtttataagattttgcaaaaagcttaaccttgccttcttgatcaggtgaccaccacattctgagattcgtggtgcctgcctttcacacttcccctcatctttctggctatctgggcttaggtaattcttggactactggcaagagtctggcagtgtctgctggtatcagcgctgcatctccacaggtgtttgaggcctggaaagttaacccagaaccaacagaccattaatagtgtgtaagtgcagagccctccccacagagccctcagagtggaatacaaggtcccctgttctccacctcctgtcatgtggtacacagtctcagcggaaggactcctttaatcccatttcagtatttcaaaggtatttgtaaggcacagacagtgcctgtgtactccccggcaccatggtggcacctgtattccctctccctgcctttgagcagtggctgaccctgcatactctcagttggaagctgtttctacactgagggtggtggaaatcatctgcaaagcgccgattgagcagtttagaatttcaggacctagggcttcccagttaaaattctggccttctagttttcagactggggcatgcaagtcctttccattatggttgataacccaaggttaatatgaaaggggtgtgggggttgaaatggcaagatccaggaaaaagaaatgaaagggcttgccactgggtataaggtaacagagcagataagaaagacagagctttgagccagtactgcttggctggctgcagtgccccggaagatatacacaaaactctattggtttttttttttttttttttatacattctttttctggtagttttaatagactaaattataaacaagaacaggctttttttgttttgttttaaataaatctatttctttccaaaatatgttttgttctgcattttctaaaaaggtgactacccaagactaacctgtagacaaggagttaaacatgaggtaaccaagagaaactacatcttggtcaactatgataaggataaatttatccacagacagtaaaagaaaagggcttatggtaaagtactagctggttatgtaaatttgagaacaaatcgtctaattagcagttagcagacctcatgaagtcagatggtagcagtgctggctggggctagcactgtccagtgggcagtgccaacagcaagtcagatgcacagaagactgcaacacgacatgcccacttctctagttgagccaagtgtgagcctgcatgagtgtctccctgcttggaccagtggggctgtgggaacatgctgacttcccagagaattaaccagactaataaaaatggccccagtctcatcccagattctgccataagtcatattaagagcccacagacaagcagttcacccccctcccatacatcagcaagtagaacttctctggctgccccgtccagttcttttgcttgtcttccagagctcagtgatcattcttttttcacccctctctgtaataaaaaaacactttaagcccatccttttggttgttcatgaatttcatcctgggtgttcatgagaaaaggacccagcatggaaatcttgtgtgattgtgaccatacagcacccaagctcctgagttaagctttccactcagggatcatcaccacccccaattgttgccttcacccactcctgttctgtttcatagctacctgctgggagcttcagcacctggtagtttactcagggacactcgcgggcttcctgatggattgctattttcagttcatacttccaggtaatgagggtattgtgttttgacttaatagaagtgctgaagccactcgcaggcctagctcctggcacatttcctcatagtcctcctgtagtccttgggaggatggtttccaagggctggtgggcaaggccagcgagggagaatggagactggtattcacggcctgtggaatgcagtttggattcctctttcaaaaaggaaagcagtgagagcagctgtcttatcttctcattttgacctctttcccaggcaaggaccatacactgtttactcgtgaaagccagcgctgtgcctgcctcagcagtgagaagggaggggcagtgacaaggagggggcagtgagaagggggggtagtgagaaggggcagtgagaagggggggcagtgagaaggagagggcagtgagaaggaaggggcagagagaaggaaggggcagagagaaggaaggggcagtgagaaggaaggggcagagagaaggaaggggcagtgagaaggagagggcagtgagaagggggggcagagagaaggaaggggcagtgagaaggagagggcagtgagaaggaaggggcagtgagaaggagagggcagtgagaaggaaggggcagagagaaggaaggggcagagagaaggagagggcagtgagaaggggcagtgagaaggagaggcagtgagaaggagaggcagcgagaaggggggcagtgagaaggggggcagtgagaaggaagggatagtgagaagggggcgcagtgagaagggaggggcagtgacaaggagggggcaatgagaaggagagggcagtgagaaggggcagtgagaaggagaggcagtgagaaggagaggcagtgagaaggggggcagtgagaaggggggcattgagaaggaaggggcagtgagaaggggggcattgagaaggaaggggcagtgagaaggaaggggcagagagaaggaaggggcagagagaaggaaggggcagagagaaggaaggggcagagagaaggaaggggcagagagaaggaaggggcagagagaaggaaggggcagagagaaggaaggggcagagagaaggaaggggcagtgagaaggaaggggcagagagaaggaaggggcagtgagaaggagagggcagtgagaaggagaggcagcgagaaggggggcagtgagaaggggggcagtgagaaggaagggatagtgagaagggggcgcagtgagaagggaggggcagtgacaaggagggggcaatgagaaggagagnnnnnnnnnnnnnnnnnnnnggggcagtgagaaggagggccagtgagtaagggggcagtgagaaggggggcagtgagaagggggggcagtgagaaggggggcagtgagaaggagaggcagtgagaaggggggcagtgagaaggagaggcagtgagaaggggggcagtgagaaggagaggcagtgagaagggggggcagtgagaagggggggcagtgagaaggggggcagtgagaaggagaggcagtgagaaggagaggcagtgagaagggggggcagtgagaagggggggcagtgagaaggggcaggagtgacagagacgctgttgtgattggggagaggaaggttcttcagaagggaagagagtgacatatgtctatacacgtttgcaaatctgttgacagaaacagcttcgaacctcattgcttttctaaacacttcattttcattccctcctcccttttcttcccctttctcttccccttccccttccttttccccttccctccttcctttgactggatctcatgaagctcagggtgctgtattattctttaaaaagaaaagaaacctgaccacttgccatgtatggcaccaacttgcccttgggagaagagtcaggagtacaagatctgtcagatacacagtgagcttgaggccaaccaggaattcgtaagatcctgtcccccaaaataaagcaaaaaaaggaaacacacacacactaaaaacttgagtgttaagtagatgtttctgttccctccccatatctaggtccagtctcctggtagttgatgttagtagttttgtatcttcgcatgtggctgtataaacctctgcatagatagcctgtgtcagcacattaccctgggctgccacattcaagatcaccacccatatggcttaaacaaaactctaatgcctcatttccagaggtgaaaagccccagagtaagattttggcaagttgtcttctaaatgacccctgtagagtcttcttacatggcagtccctgtgactctgacaagcccctgtgttcagggctgttccaatgatcctgttcaaaaccctaccctctaaagaccaaataaagtcacacttttgggtaccagagactagtacttcaacatgtgaattttgaaggagacacaggctcagtaatattaaccttctcatttcaaaacagtatcctattgtgtagaaagcccacgattactttaacattaggcctaatgcaaatggattgtaggctttctcgatgtttgtaactaagtcttgggatgctcataggtgtgattctgccaggatgaacttggaagaattgtaagtaatgccctctgaagagtataaaaattatatggaggggagttcatgaagcctcaaccctataaggtatacaaagagctacaggcaactaaggaatgtcaaagcaggaaaagtgttccccggggaagagcacaccattggttatctaataccagtggtcagccctgaaaacacacacacaaataacactttacagtaagagcagggcacctattcatctttaggactatatatgtgtatgcttatatgcatgtaaaaacagtaatgaaaacagaagccatgaatttgaaagagtaaggaggcatatatgggaaggtttggagggaggacagcgaagtgtgaaatgatgtaattatgttctcaaaaataaaattgaaaaaagtaaagtgaaaattataccccttaattcttggtgatacgacgctggtaggagattgagttcagcgtgtggcttgtgatggtggcccagggcctggggttgcttgtgcttttgtttgagggttttccacccacatgacttcatcatacattactcactgaacatctatttactgaggcaagggtggacagcgccgctttgttcatttttaatttttatcttaaacaaaaggctttttaaaagagtaattttgagctcatagcaaaactgaatagaaaaacagaaactttttccatatgctctgttcccacagaagtgtaccctccccagtgatgactggctttctcccatggtgaccagcctcctcctgcggtcatcattatctaatgtgatgatcagcgtcctcccaggatcagctttcctaatgacatcagtgtcttgccatgtcaccatgctctctcttggacagcatccctcagcacagagaccagtttatacctcatgagtctgtatgtccccttggtttcccaaagtccctagtttacgttacagctcagtcttggtgctctaaaccctgtgtttgttttataagcctgacttgtttggcaaaaggcttatgccctgtagagccaggaataggacagtggcttttctctccaagcttgtgacagcctggagtttgtccagcaggaattttctaaggtgaagaactggaggaggttctgccagggtaataacactctggaggcaggggctggatgaatctattatatcctaagttgtgttctccctacagtgtggccagtcagtgcaggtggagtaagaatttcttggaatgctagcgttccttttatagactctgttggcagtgtccacatagtacatttgtcagcatttagcttaaggcaatgcatgccttcccttgtttattggtatagtttgctttgaagggtgactcttgatatagtagagaaaggctattgttgaattgcaatatttttataatctttatacaatatgtacacgcatataaatgtacatatgtctgggttttggcagtactgtttttagacctgtggcactgcacatgctaggtagattctctacactggaccaaagcactgcaagtaaatagtgctgcttgacaaactcggtgcatacattgatacatgacttaaacatgaattaaaccacctgcttcgttttagtgttctccataatcgtatcctttctgtgaccatttagacaaatttaaatatctgtatgcattccttttcccatctgtggagatagtaagcctaaccatcgactctgccgtggtacagttccatccttagctagaagctttctagctcattctgaatgcctgagatgttggcctgtaaagggatgagacatcctgcctgggttttgaaagtgattggctattcctgtgctttgggccagtgacaggcagcacagcatgaggggagcatctgacagaagagccagggcctcccaggcctttctgtgacctgatcttgctctagctttgcacttaggtcagacatcttcaacatttgggtcatgaccccctttatgggccaagtgaccctttcataggggttacctgagaccatcagaaaacacagcaggttatggttcatagcagtgacaaaattaaagttatgaagtagcaacaaaaataattttgtggttggggggtcaccacagcatgaggaagtgtgttaaggggtcacagcgttaggaaggttagcgaccactgtcttaggttggatgtggccgggccagtcttttgccacatttgagcagtgcttaagattcaaactttagtgaactgcttctaaaggaattttctttcctaatagggtattttgtcacatctgaacttggtatgcagcgaatatggttatctgaaacaacgtggcttaaagaaaagctaggaaagaggagagagagccagggaatcaagctagttttgggggtggggtggagggaagagagaattaaaaaagaggaagatctgtacacatatggaaagagtcaataaaatcagagatgtcagtggggaccaagaggcctgagggtatggagttggtagtgctttgcctgtacaaggccttgggttcaatcctagaacgttatggtggtgcatgtctgcattcccagcctttgggaggaggagcttgaggccaaaacaaaacaccagccaacaggatgtctgtatgtaaagggaacagcagctatgctggtaaagaccacgtgtagcaccgctctttgcacgctctgtctgttggctcagcctacggagaatttgttaaaagcggtggcctgtttagccttttgagtaagatggcttgaaaagttgagtgctagatgctaagaagacgttagcaggaatttgaagccatgttgccatcctgaagggcagagactccaacaccagtgctttcatgaagtaaggaaggaagcttgtgatatgaccagacttcggagatctatgacattgttataatttgctgtattttcaacacaccctgctacctagtctcactgtacatgatgtttataatatagtcttgtaactcgtgcttgtttggaagctttgcaaagttcccaaacttccagatcattttcaagaaattgaactattagggcttaggttcaatataaaacagtgttggcactcacagattcagatgtagtttgcagtttatggcaattcctttcagagaggctctgttgtgtaaaatctcctttacaccagctgcagctgagggggcttccaaacgaccacagcaacgataagggacatgtagcgtctgttcccactgttactttataagtggggataccgagtcttaatttctaggtggcagagtctaactcacagtccacaaaggctgatttctctcctgagctgctatccacttactagcctgctgccttatgttttatcgaagatctagttttcccaaataatgggggcagagagaatgttgaattggttcagtatgtgctgtacaagcaagagaaattgatatgatttctgggacccacataaaaaactgggtgtggcagcctacccctgtagttccagtcgccatgggcttcctggccagctcatctgggtgagtggatgaggtccacattcagaggaagactctgtcttgaaaaacaaagtggaaaagtgtcaggagcggcatccagtgcagacccctggcctccacccacatgcatgtgcagtacacatggccatgtgacccagtgacctagtttccccaagtgaaagacgtatatactctagtggtacatcaagagtctctgccctgagcctatactgcactcaatagcctagaaagactgctgtaaggggcactagactgagaaataaacagtgcctgcataagagcttactgatgcccttcttcaaggatagccttacttgtgtaaggagtacttagtagaactcccagcgtgtccctaggtgttcgttggacatttgtattgctgggtccaggttcttgtttttcatgttcttcttctttaatggaatattttttctaggttttagctgttgcttttgctcttagctgatcccagaaacctttgtttgctcttaagtgtaatgactgtgtacttctgagaaagtccctttcctgtttatttctggccgtctcccaagctattagtgctcatcatttgagacagcatctgactagttctaacaagctctgccatgcaccagactcttctcatgtcccgtggtctgatgatcaatagaacagtcaccttgtagcctgggaaggccaccagccaaaatgtttgtaaagggtcaatgtttgtaaagtagtagatttgtatatgatatcaactggatctcttataatttagttcaaatttgacactacccaggtttgataccatctcacaagactgtcccaacttccaagactgatcataatctgaacctcccatagtcaatctgattgggtataagcctgagctcttagactttccacctagggttcagcaatgggcatatcttcttcgtgtacttactgacattgaaattctgaattccactgatgagggtttttgtaaagatgccagcgtatatcataactgattcagtcatcagccattggccacttaaccaccattctccctctgtgaggaaagagcggggacctgaaattcccaatcttcagtgtcatgtggctgacttctggcaggcagattccactctacagtgactggggagggggctcaccaagagtcatggcattaagtatagactcaggagtggtttaaagggggttatgaataccaggacactccttgcccacccgtcaaattccagtggttttagaggctcgtattccatgttttcttgctgtgtcacagtagcacactctgaagggatgtttgtgtctttcctagttggcctgctgttgcggatctgctggctgctccctctgctgtggctgctgccctaagttccgacagtctcggaccacccgcttcatgtatttattctacttcatcctggtcatcgccctctgctgtgtgatgatgacaccctctgtgatgaagcaggtgaaggaccacgtaagtctgtgggttttgataagttgtatgtgaaacttgatgtagaggactgagttcaacatcactgtgattgggggcttgtttcttgtctgctgctgtgataaaacattctaacaaggcaacttatacaaggaagagtttatttcatcttatggttccagagggataagagcccatcacggcggcttggcatgacagcacgtagttggcatgacagcacgaagttgaaagctcacaacctgaaccataacacaaagcagagagaacagaatggaagtgggcaaggccttttatttagcctgcctccccacccctgtgttgtactttctccatcagggccactccatctacatctcctcagctccacctacatctcaaacagcaccaccagccagctggggacagagtattcaaatgtctgaggctacggggggttgggggagggcatttctcattcaaaccaccacacttggtctctgaattgtctcaaagcttgtccactgctttcaggccaaacaggcaagccattcaacagctggatctttaatccactaattagtgtttggcctgatgtatagaatgtctatggatgtgatgtatgtccatgatggttgcacacaagtctgtctgaatgcccatgaagactgaaaggacatcaggtgttctacctattacgctctgtcttgtctctttgagacctggtctcatgctaaccttagagctgggttggttattggaggccagcgagcctcagtgatactcttacccatcgtgctgaggttatggaagcacgcatgggtatgctcaacattttacataggtggtagggattcaaaatcaaattttcacacttaggcagcaaggcagagccactcggtttagccactgggccatctttccagcccctagtagttttatccttagtagtaggatatccatagttagatgctgttggtagatgtcagaggattatgtttggtctttctttgtttatatctgtttctgataaaaacacagcctctgcatgtagaactttgcacatctttttatcttaaggatgactgccagtatttcaagtcatggctggttatacacacttaattcagcctttatggaaaggatggtgcagtttagacagtgccacagataccaggaagtagtgtgcgatgattttaacctttctagacagatcacttgtccattgttgtctctgggtggaaggaagagtcccagtcctttcttgggcagtgtgttttgagggatccctggagtgtgatgttcatggagatggatgtggggtctttcctgtccccacatagcaggcctctctgagccatattagaggatagtgtgttgaagtctcaagaaagcccaataaacaacacaattctttctgtcctaggttttgagaaaagagactataaaatgtcatcaagtagaggccagatatcatggttattatttaacaagtcacatgaaacctttcagtttgtatttgcagtgaggtcagcttcctcctcagctcctgaaccaatcagtgcattcacctctgctccattggcgtggttcatgatagatttcctcttctagggcacagttggccaggaagagaggacagcagtgtgttgaggcggctcttgtctcaggggaaatggtagatgaaagcatagctgtccaagtccatttgcctttaaagtaccgctgagccctcatactcctgggcaggcaatgaggtggcagagcagccaggcctagagtggtcctgtatcccttctgcagtgattatagtctccattggagcaactcctaagcaaacagtcccagtcctggtccgtgctgtggccatttcaaacacacccattttctttccccttctctttatggtcagagcgggaccggggccccgcatgtactaggcagtccctgaactattgacctacatcccagctgaaacaaccattttcttacaggctcttggtctattatcctgtttatcctttagttagaataggcccactgagcttcctgttgggtaatacatttctgattgtacttgtatgcttttgattacagaataaacgactgtaaagcctctgattaaggcaccacagtgggggatatgtatgtttagatgaaaagcgaagtttgtcacttggaaaaaaaagatgggaaattccctgaggcctataccaaggtaaaaagaataggttccatgtgggaagatactgtagatgtttggagcagagaccaaggccttgggtgcctggaggggtctgtgctaagacttgctctgtgcttattgatatatttaccacctggtcccctcctggcatcgtggcttaacttaatgtgtttagggaaagatgtgtgaactcacaggactggaaatatgactcagcagttaggaacaaacagtgtgcttgcagaggaccaagtgcgggtcccagtacccacttcatatagctcaaagcctcctgtagctctagccccagggggtctggcaccctcctctggcctctgtgcgtgctcttcccctattttattaaaaaataatatatcattaaacagtatatataattaaaaatgaaaactttttaaattaaaaaaaaatagctagactgctagaaggattggtttgaactcttcctggacagaatgtagaagtctgttgaagcccttttacattcatccatttagatgacctcacatgggctagtgggtcctgcaccactgagccgcacctcagccctccgttcactacttttatttttctagtaatgtagtactctctttttaaattcataagcagcctgtggtgacagtcctctgtctcagcttgatgacccactgtggtcctgtggtgacagtcctctgtctcagctatctggtaggagctctgctcttaacttttcagtacgagtacaatgaaagccttagatccaagagacgaaagtctatgcctatgttattagtaacatctcttactgcaattgcaattgtgtaggtaatctggaagccacagctatgtgttttaggcatacattttgtaataactcacacactggattcctatttaagtatcctgctcctgccccatgcaacagccctaacaattccttcctgtatctctgctgcctgactcctggcagaatcttcaaaaggaagatgctgactggagttgcccaggaaggcttcatggaggcagtggtgtgtgtacatagtaagtattttaagagctggtttttataggataatgccaggtgccagattttagttggagcattttccctgtatcttcatccttcgttaccactggtctcgtgtatgcagaaggtggtggtgttatcccactctacaggtgaggaagcaacgagtcacctaaccagtttatgctggtcttatagccaactactggaggtagacttgggatttgaacagggcagattatgtgctcagctcctgggctgtgtagctggaaaggcagagaaagagcaaggatagggcatgtacagagggacagggaaagaaaagacagtgtctcacatgatcagatcccactggatttcctgttataagataaaggagcatccatcatagagtcccaagcagaggtgtgatcgtggagcagggggagactgaaggaagtgagatcactggggtgagtcgggatcagagatcagatggagagggaggggaagggaaggtgtaaccctggcgcctcgcagagtggtttgtcaatgtttcatgcatgcctctgaatgtacctatttaaaaatggcttggccaggcttcttgcatagagagtgaggtcactctgagtgaaacaaatcgttttcccttcacaggggatagctatgtggccacaaagtcagcttattttgtggtgctacaatcaggctgacctcatgctcaggcggtgtttgagggtgggccctgaaaggtctccttgtagtgcataggctggcctttggctggctcttgcctgctctttgttggcctgtgggaatgctagaggtgacagtagcagaggagaaaaagaaccacaagcttgtggcctggatggggtgttattgccacccactctgcattcttgcctcttagctaggcccctgtcggggtcacgtggcctgtggtgtgagggccactttctggtttcagaatgtgatatctcagtgagaaggaccagtgaggcaacttggtcctgcttttcatgaggggagccctcctgagaccggagaagggtctcctgtatgttgagtcacagcgagtggtttttgtcttcttggagcgagccttttttttcccatgccagaatgtaggagccgtttaggctggctgctcttggcagtcaccatagcatccaagcaagtacagaatgtgggagcaccagtggacattagaatgctgaacaccagtggacattagaatgttgaacaccagtggacattagaatgttgaacacaagaggcaaagcaagtgaaggagtaagggctccaggtctgcactgaaaaaccaagatctgtctgcctggtttgaagataaaaggtgacagttgagtgtcccagaagctggtcatttgggagagagggcaaaaaataaaggcgctctctctctctctctctctctctctctctctctctctctctctctctctctctttcgagacagggtttctctgtgtagccctggctgtcctggaactcactctgatttctggcctcgagctcagaaatccgcctgcctctgcctcccaagtgctgggattaaagacatgcgccaccaccaccaggcaaaataaaggctcttgtgtgctgaggaacaaagatctcctggccttttccgctgagagctcactgcccactgtgggaagaacctttggtgctggaacctttcatgccttaggttcatcttctcctgccttccacttggcacctccattgccctgatggatgcagatgtcagacatggtgcatttaaaaatgtcaaaaccccaacatatcctaaacagtgctgtgaactcatttgtctgatatctggtgtgtggagcatgatgtaatatggttgctttacatttaagttgtaaagaagttctccttttgttgtgaagagagtctggtacaatctctgctgtctttttgtcgctcctacagtcatgtttagaaggtgttatgtctggctgtaccttctgatctctgcacacattttattttgcacattatttcccagaggtgagtcaggatagttttgagtggcagtgacttggcaactgacgactttgactaggttttccctagctgacaagggcttttgcacttgttttcaacatatggagcacctgcaaggaacacaggacaagactgaatgggatctgggtgtgaggaacgtctgcctcatgggattgtacaacagcatctcccaccttttcttcctggcctggatgaaggtagccaggttgactatgtctctctcctggctccggactcatggccacagccagattcagatggctcagatgaggatagacaaactcttggaactatacagttggcttttatttgctgccttgaggggaactggcatgcagtaatgagaccctaaccctgggctgtgcttgtatctaggcattagcaattcttggaatagctttgtgtttctgatggagttgtatgtgtcaagatagacacctgggctcttttaggtgaccattcaggctgcgggggagcagggaggtcagttagcaagcgggttagagtgagcttttcaaataaacttgcatggccttgggctgagaaacaagacacccttcttgcttacagctagtttgtccgttatcaactagcctgagtatgtccatcaaggaacttgagaaatcactttgttatctatctactttgcatagcatttggctctactctgcttctgtctcttactcatagggcagggctgggacaccttagagtctctgaggtcctccttctccaggaaccatttgtcacctgctcttttcttttgctctgtcttttcactctgggcattgagtgtacactttctgcagtttttgcatttttcttaagaggcaaaggtactttgagtctgatagctgtgcatttggagtctttgaatgtggttagtgggatggattaaaaggatttctctgtgtggccagaaaactcactctttgaaaacacagggatgagctagacatacgaagttggtatttcccagtcattttcacattgggcaagaagaaatttatgtcttcattaacatactgtggcactgacagatgataaagaaaatgtttaaagtaaactaagggtcctaaggctacctgctataatgcagaaataccaacttctcaattccctttaactttaagcttgcaatcctggctgtgacctcctgctaccctggtctgttttgggaccttgccataccagccattgctggtagagttctgatctcggcctcctgtttttcagagcccatcagctatgtggctagaacctgtgtcttgccattaaaactacttccctaaactacttgcctccatctgtctacaaccccaatcctggagtgcagcaaggccacccttcttctggtgaagctctgcatagcacctgcctggatcacgagtcaccctcagccacaggctcctccatctctgtcagcccttcccttttctttctctcattacagacttgtcatcttccagaagcattctcccccttttcgcctgtccttagtaaatccagagccaccctggcttcttgttgctccttcatttttcttgtccttccttgtagaggcttcctgtttagggcaatattgcatggtagttgagagtttgagcttcaaatctggacagctgaattttgaatcctggctcagttacttagcaaagttttttactctttctaccttgatcttctgtttaaagggaaaaaaaagataatagtaaatcaagatgttgcttaagtgtttgggtgccctagactgcatggggtcctgggtttgaccctgattaccaacccatctcatttctccataaatatatatcatagtcatccagtccacaggcatgtgaaaacccactgatctaatccgggaagcatgcttagaacaatacctggcacattggtttcccagtagcatgttgacatctccagcatccaagaagtcagcaatctgagtcatatcttgtacagctttattgagatccgattcatataacttacaattgagttatgcaactggcactgtaatacatagccttagaacattttgtcactcctaaagcaactatatttattcacacatgcttcctatttcttcccaagttcctccagccctacagagccactattctattttctttctatatggatttgcttattttagatgtttccatataaacggagttacacaatactagaatttgaatgtgtctccgaagaaacttagtttccaagttcatttcctacttggatacaggactttagggggcataactagggttagatgaggttataaagtgcagacccctatggtgacagaagttctctctgaaaagaggaagaaagacctgagctggcacagttgctgaagcttgccttgtgatgtcctgtactgtagaatgatgcagcgctaaggtcccctctgataccagctttgtgctcttacgtttcccagtgtctaggaccatgagctgaacaaaaatctgttttttcttttaaaaattatgatgtattaggtattttattatagtaacaacaaaacatactatgtatttttttctacatgacctctttcacttagcatgttttaaaaggtcaagcacactgtagcatatgtcagcactttcttcctttgtatggctggatagtagtctacttatgaatactccatattttattagttcattcctcagttgatggacaatttatgctatttttaccttttggcacacaatgtcacctttttgtatgtgtatataattattttctgggtatatacctaacagtagaatttgttctacaatctaggcattctggaccatatgaaaacaccttgtgtaatctttttttttcttttttttattattattacgtattttcctcaattatatttccaatgctatcccaaaagtcccccacaccccccctcagtcccctacccacccattcccatttttttggccctggcgttcccctgtactggggcatataaagtttgcctgaccaatgggcctctctttgcagtgatggccgatacatatgcagctagagacaagagctctggggtactggttagttcataatgttgttccaccgatagggttgcagatctctttagctccttggatactttctctagctcctccattgggggccctgtgatccatccaatagttgactgtgagcatccacttttgtgtttgctaggccccggaaccttgtgtaatcttttgaggaattccagtactgtttccaaaatagttgcatcattaacatcctcaccactgtgtgaaactttcattaagtgatgtataaatgttcaagtttcttctacccttgccaactcatattatttccatctccccatctttgtgggtctgtgatctctctacctgtgccttaaaggctaccctgagccgggcttggtggctcacgcctttaatcccagcactcgggaggcagagacaggcggatttctgagttcgaggcctgcctggtctacagagtgagttccaggacagccagggctacacagagaaaccctgtctcgaaaaaaaaaatgtctctacacagtaagggacttttttggaatcacttacagtctgcagtccaactaacccaacaatgggaggctgtgaatgaaaatgctacaaatctagtagtagttgttcgatcccacgaggctgggtatcccagctggtcttctgtataagctgaagtcttgaagacataggttccagcagatgtgctggcaagtatgtgccaccgccttccttcttccagtgtcctatgtaggcctccagcagaaggtatggcctagactaaaggtgtgtacgagcacacctagacagttcttgaaacttgctctgtcccaggctggccttgaactcaggtctgcttgtctcagtctcctgggattaaaggcatgtaccaccttgcctgggcctaagcttttcacagccacgatgccgcaggatccggatcaaaagcatctgtcttccagcctcaagatctggatcacaggtgtgctcttcatttctggattgtagttcattccagatgtagtcaaattgacaactgggaatagctgtcatgggtaccttcacttagaacattgccagagtcttcctcctccttcccatttttatatccagtactgataacagactttccacagacaggacattgaggtactgagtttgtgctgtgcgttctattcagtcatgaatgagttagctaggctaggctcctgccagcagcctttcttatctagacaattgatcccatgggtgagctgagggcactgttgctacttctctttctcccacatcaatcctgttccagattcttggagtcactcattggcttgtctgttagccaccgaagctactgtgcttgggtgtttgtttgtttgtttgttttgttttatcgagacagggtttctctgtatagccctggctgtcctggaactcactctgtagaccaggctggccttgaactcagaaaaacacctgcttctgcctcccaagtactgggatcaaaggtgtgcgccaccaccttccccggctttgcttgggctttgaaagtcttgctaagtgcagcatctagttgcctagttagttctgatgactttttacactcctttggtggttcttggagtggagtggttcatgaaatgcttccatacaatgtttaggactctagatgggcagataagctactttttctcctattttcagagggctatgatgacataattgtcagccttgtgcatagttcaccttcctggcctagtcacggggatcccgagaactaaggtctgaggctaaagtgtttaattaaagaaataagcaaagccaggatgcagctcccatctgtgattggtgacagtaaacagctgggcctattaagtgttacactgagaaacagtgttgtcttttacaggttataatttgagtcagttggtagaagaataaaggagactggaagagcagaaaagccctaagtggtcattttaactctccagtcatctaacagatgacatagctcatgaagtgaagtggtttgcccaaggcttaaaacactagttacaacccagggtccctggttgcttgaccagtgtttcctgttcatatcactaggtttgcttgttggccagataatcacagaaataaccatcctagcctaaagcaagcatagcttgctctgtctcctaaacactggatacaggagcagagaggaggagtctgtctaggaactgccttcttgtaatagtgacatccatttagtaagcagagccttccttgactcctgaatgttctctgggcacagtagcaggaaggaatgattccttctggaaaggtcaccttcccacctgcctccttcccatccttcagccaaaagctgggctcaaagaaggaaaacagaatagccacaaacgatttatttggttttgcctggaaagtgaaacctactcttgggttatgttttgtgtatcttcaaaagacagacaacatcattggtgaaaaatatatcactttgatgcaaaacaccacagtttgtggtgcagagcagcagggattcatgctaaagggcaaaagtctggctctctgactgagtttggtctctgttggttgagtgttcaaagtgctgggcccagaggttgttttagttgaattctagacccaggcaaaactccccattctcagcagctacctgttttcttattctggagaaattttaagtttattattttaacccagctgagtgaaacaactttcaaaagttcttttgaacaacagctgagttccgtgtcagtatgctttgtgggtcagtagtgtggagccccagttcctgtggatcactaggagctgcagaggtctcctgggctgggagttccacttcttattttccctggtcccatccctcctcagcatggcttggtggggacaatgttatttttcatccgaggtcttctaggccggaaacaaacaatccctgcaagtcccagccttggctcctctctgctgctcctgccctccatacagtgaatgaggctgggagattgttttgtacttgaggcagtgctttgagcgatgatgagaggctttggctagactctgaatcaagggctaagattgactcttgtctagaaaccacgagcttgtcaggagctgtacagtaggtaatgttcactgtccttgtctgtcagatcccttgcacagaaccctttggaaggtcccggatgtgagctggctctttttaaagattgtcctgcctatggtagggagaaagtgatgaggtgagaatgtgaattattctcagtcctttcactttgaccatcaaaagcatccgttaaatgactggcccccaaacactcccagataaatggaatagtcgggtgcttacagttagaatgaatgctattacctgccataaaaatggagccagaggagcagacaccacagcacagaaggagctaagatgaactaggctcagagtcacgggaggaagctcatggatgctgggaacacagtaccatccaaaccccatggggccttatttctgtggttttcattatctaaggtcaatggaaatccaaaaatattacgtggaaaattccagaaataaataattcaaagctttaaattatgcagcactctcctactctatcctgcttaggacatgaattatccctttgtcccaccaactgtcactcagtggacgttttggtcatcagatctgctattgtggtatcagtacttttactcaagcaatcctttgtttgtttgcatatttgttggttgatactggggattgaacccagggccttgtatgtgctgggcagttactctcccaataagctgtaactaacctcacctcttctctcctcttcttcctcttttcttccaccttcttctcctcctcctcttctttccacccctctcttttaagatagggtctctctaagtgtcctaggttgtcctcaaacctgtaattcttttgctttagcatccagatgtttagatttttaggaatgtgccatcaaactcagctcaagtgacccttttacatgcctcccaagggtaagagtattgatgttggctgttttattacagtgcactgctgctattgttttattttatcataggaattgtgcagctattactcagattgattgcccatagttctaggcacccattgttttggagaaaggatctcatacagctcattctggcttccagctcagtacatggctagggatgcccttgaactcatttctgtctctacctcgtcaatgctggtattacaggtgtgtactgtatatctgcaaataaagtgagatcggtgtggtttaattttgatggtccttttacaaagtataagggatattgtttggccacactacaatctcagtacattctttttggattgtggggttttgtaacagggcctgtgtccagaatagcagcagaatgtgctatatagctcaggatgtgctagaactagtagtaccttctatcctagccattgtagtgctgggcactttgatgataggtgtgcactgccagctgctgagtacattctctgctccattttcttttgttttgattcattggagagaggaagagaaagagacagagagacagggacagagtatatttgagataagatcttttaagatcttattttgtagtgtagactagccttgtctgaacttcctttgtagttcaggctagcttttaattcaagtggtctgtctgtcttttaccctctagagtacttcaatacagacaagcaccatgatgcccaattgctgatcccattatttaaaaactgcttaaaatctgctgctttcattgatttatccatttggtaccattaagcataggtaccaaaaactcaggtgttctaggataacaacataaggcactgaacctcaggtaggggaaaccaatagtttggtagctggcttttgtggcgcatgtagagaggctgacaggctgaggcaggaagatcttagttttgaggcaagagtgtgtatggaaggaaaccctgataatagactggttggcctactcttgtgaactccatctggggatgtctggatagatagctgaggtgagggagagactccccacaggaccttaacctgttccccgtggctacggaaatcataatgggcgcagttcagtgggacagttttctacagtcaacacactagtctaaaattaatgtatcgacatgctggctctcatcagtgtgggttttatttttggttgttacaggctgtgcttctaggacagatgggacagatgtaacagatgtgagtggctctgttaatgctgcttaaggcttttgagcattggacatccctcccccaccacttcctctctccatcaaaatagaaagacgattcttctttgtacacgaaaaatggcagaaagttctacagtttgtttcacttaaaaccagcttctgtgtgaagcacatctggtgagggaggtgccaggagctgtactggcataaccaggtgtgcccctcagctcccactcctttggcttctgatgggtagagtgacttgtcacagttgccacttggccttcaaagtataaacacatactttatcagctaactgctctgtattaaccttaagactgggcagactttctccataaatgtctgctagtgaaaactgcaggctctgggcttccactgtagtgtaagagtggcccaaacaatgccaacaaatgaatatagcttcattccacaagaaagttatttacataaccaggagactggctagatctgacctatgggctgtcgttttcctggctgctgttttaggcctgactgactccatgcaggccacatacgtacctcgtctctaagagacaaacttcagtggcctaagctttatgctcaggcaagcagagctctagcttacctttcaggtaagggctgcatgaaccccatgcctagctaggcaagcacaagctagtgtctgttattctatatgggattataagcaagtggaactaatttatggggaaatagttatttgtatgaatcacttcagtcatgttagggatgaaggaatgtgaggaatgtaaaaatgagcatgtgtggatcctaatacggggtaagaagtgaggagtgctggagccacagtggccgctgcgcatggttctcaggagtgggattcacaagcaagggattcaggctttcagaatcacgagttgtttaagtatgttggtgtcccatcttacagaagacagttcattcttgtgccctatcattgtttaaatatacatgatacacatgcgtggcgtgtacgtgtatgtgtgtgtgtacacatatgtatatatatacatatgtacacatacacacatcactatggttatctgcacagcatttcactagacagttaattactcattagcaccgatttaaactgattaattagccagtgacttacagcactgggatcaaatccaaggcccatgtatgctaggcaagtagtctactggttgagcaacattccagctttataatatggatcttaaacctattttatttgatgcttctatccacatgacctgaataatacttgcccagagtaggtgggaatgagtggctaactaaaccctgtgtgtcacacacgtgtggcgtgtggtgtggcataggggataaagcgtgtgcgtacaagctctaacttgactgagctttccatatttccccagaaaccaccatgcatgcagctgcaccctttaagaggaccttcgctgacttggttagcgcagagagatttgtcaccaggggttgtagctctccttggctgcgtttctctgggcttagactgaccttcctctgctctttccctccccctcctcccaggagagtcagtcgattcgagtgggcgtgggttgcttcctttgccatgtgtgtgctggctctggactcctcagccctttcttggctggcctgaaacttactgtgcagaccaagctggtcttggacatgaggcatccccaccccctcagcccatctctgcctcccagctactagaattacaagcatgtgccagcatgcccagtatctttagtctagctgtctttctggagtgagtacccttgtggagctatccacctacacctccttttgatacaggcgcctccaggacaggctgtcattaaatgaattactgttctgttgccgtgattcactcctgtggttacctgtcaacttcaaaaccgggaatcctcgtcccaggtccgtctctgcaccttccatattcacaaatgatgtcacatccagcaggacagcgtctctcatggtcggttctcactgctcttcactgagatccacttctgtttctccttcagaatcagagactcatgagctctaccttcatctttacctaaacctctgtcgctggagatgaagttcactggctccactctgtgtctggaagagaccttcttccagtcctgtgttgtgtcctgtgagttctctggtttggactgaaggcttatgtatttagccctcagttagagctgatttctagctgtgaggacttgtgtgaactacattgtcagtctgcctgtgtgctttcgatctctgaaggctttctatgggggacatgacgctcctggtttgacaagtggtagggtcagtaaaactagaccatgggtttctaattcaccccttccttttctgaacctttaataaggacagaatatatacttttctcatatatttttaaaaaaggtcaaggtacctagcccaaagaggggcaaaccataattggtgttgctggttttttttttaagccttttttattagatattttcttcatttacatttcaaatgctatccccaaagcccccaccctgctccccaacccacccactcccgcttcctggccctggcgttcccctgtactgaggcatatgatcttcgaaataccaagggcctctcctcctattgatggccgactaggccatcttctgctacatatgcaactagagacacaagctctgggggtactggttagttcatattgttgttcctcctatagggttgcagacccctttagctccttgggtactttctctagcttgctcacagtcatcttttggatgtaacacagggcccctaatgaaggtgttgctggttttaagtgctcctgggttccccaaaggctgcaggatgctaaggtactgaggaaagaaccctggcctcacagtctgtgcagaagggtggaggctggctcagtattcttgtctcacagctgctgtgccctgatcagtaacaggctaatactgtgctgtcagaattacttcatggagaaaagtctaagagagcctgaaatgaagacttaaagtcgagaggtgcacccctcccccgttccagcattctttccaagtgagggatgacgaaaaagaattcttagatcttgctcttctagtttctatgagctaatttatcactcatgccgagatgcccagagctttctcagcagtaggattccatctgaagctctagaaatttgatagaagcaaatgtaagactaattagctttggtaatagcacattttcatctctgaagtcatacagctatgtgactcccatcttcccttccatttctgtgaggaccactcccacaaattttttttcccctaagtttggatcatctagaacccgagtcagtgagaccaaaagacttttctgtagccgtgttttatgtgcctgtgtgtttgcatatggcatatatgtatgtacatgttcacacatgtatgcctgttgtatgtaggtgcttgtgtgtgtgtgtatgtatgtgtgtgtgtatatatgtgtgtgtgtgtatgtgtgtgtgtgtgtgtgtgtgtgtgtgtgtgtgtgtgtgtgtgtgtacaaatacatgggaggccaggttgatgttactgtcctcatttggctcccagcttgttttggataggatctctcatggaaccttcagcttattgattcagccagacagcctgcccagcacatgttgggattcccctatcccagccccccagtgctgggactaaagcatgtaccttagagtctggctttttacatgggtgcgggggggatccaaacttgactactcaagttactatggtgagactttagcaaatgagctgtctcctcggctcctcttgccttcggtttttaatatcaatttacccaagtttgaagatgccgggggcattgctagcttctgctgctgctgctgctgctgctgctgcttctggtttctttcacttgaggttggaacttccgcacatgccgtggaagtggactttcctttaggaagtgtctatctaagtctgagagttctgtttatgctttgggaacttttgtttccttttattaagttctgcagatcaaatccctggccttgcacatgcatggtaagtatattgctactgagctatgtccctggcccttttatgttttgagacagggtcttaccctgttgcttagcctggccttaagcttgttatgtgtcccagactggcttctaacctgtgatacacgtgtgtcagccttttaagtactaggactagaatcaagggccaccgtgccttcctggaactcagttcttagggactaggacccgtgcaccactcatctggttggcatggttctatagtaaatgctttgacacagtggatggagtccagatgcccaccttaccttgtttagatgaaatatacccttcagtggtccttgcagtgtgtctgactccctctccagcaagctccttctgtatttatacagtgcctaagcttatgtaatgactaccgtggacaaggcactgtaggtagcccttcacaaggattatctggaggaatttcctgggtaatttatgagattacttcattttaaagatagggaaactgagaaaggggtaggggtcgggggaagcttgcccagatgagcagtggagtccggactataaatccctctacgctatttattcttacttgacagtttgtgttttgagtttgatttctctgtgggatgggaaaaaagcctttgctcccagggacccgcacagaacaatacagactcagtgtgtgatgtccttggatgcccagagcagacttacgaggtaacaccctcaagtatggaatctgtgtgtgatgtatgttttctttccccaaaactggaatagaacttggaacagcaaatatttaatcagagaaaattcctcttgttaaaaccttgttagcctgtggcgctcggaggctgttacctaaaaatacccagcacttactgaaagtaagtgttgctaagtcacccacagagcataaaagaggcttagttaatattggcagcgggggtatttgcccttagtttggatcacattttcaatgccacatacctaccctgtgatgctcctgggtgcctgtggccacagaagggcctgacttgagtaaacaagggaggggtttactgggagtggccacagagaaggctgtacctgccagcgttcggagggagggagaatgtaaggaaggaaaaaggtaggagggaggggaggaggatgagcggtgggctggtataggtggggaatgggccagtgtgcatgtaatatggtgtgtatgggggttagtgaggtggtgtacacaaagtgggaaaaggcaggtttgtaatccaacacttaggaggctgaggcaggtggatcactgttagaccaaggttactctgggttagaccaaggttaccctggggtacaggggagatcttgaaataaaaaaggaagggaggaaaagaggaaacaaagacagataacaattggtattattgacaagtaagtcatggggtggaaacactgggtctgaggttacgaggatttgttgctctcgtagagactagggttctgtccctgacactcacagggcagctggcagttccatgatttctgatgcctcttctgcactctgttgacactgcatacatgtggaatgcagacatacatgtggtcaaaacacccccccacacaaagtacatctttttttttaaaaaaagaaactgtgtaaataaaatagtatagtaagtgatgttgttgaatttcttctttataaatatagattttgcttgtcaatagtactgttcatatcaatgtgactccattagggtcgagagctctgaaacagccttcttgtttgtgggcccattcatattcataaacttttttttgatactcatctacatacctgaaagacacaacttacaggaggaattaatcattttggctcatggtttctgaggattcatagttgagtatctcagcatttctgagcctgttgtgggagtgtgttctcagcctggcaaggaaatagagaaaaaacatacaggagaggccaggccaagatacagtcgaggagaggacgtgaaagattttaagtcagaggcgataactccaaggaaacaggttttccagatacagcggagctgatgcacagcggactcacaaactctgagagcttgcaaactctgagagcatgcgcaagacctgcgccatcttaattcagacaaggccctagcacggagacagggaagtggggacaaagcctcaccttttgccaagaagccgattaaattcatagcttctgggagagggaacgtcagttttcttccatggagaaacactgctcagtctaccaccttctgcagcaggctcagtgctcagagcagttgccacataagtcgtactcagtggatttgtttgcagagaagagatgatgtatagttgagtgggaagagaagggggcaaggacctgggaggaaatggaggaatgggaagaatacaattaaaatgtacgaacttctcaaaagtaaataaacaaaaacacagtccagagctatgccccactcgcctccctactccacctgtgctctgtctccttctcagaactccctgctaataacattgtattaagaatccattgcatcagagtcctcatgagctggagctcaccctcatgcacgcatgcacgcatgaagggagatgcttcactaccaccctagtcatttctcaacctaatcagcagtcaggagtccccatcacaccatggctttcccatatgaagatttgaacccagatggatgctcactcatatttcaacccagcttaaaacaacaacaaaacttagactccattagaaagcactcacatggcctggctcatttcctccatgtgggcacttcctgtgtctttgtgtccacttttcattgctactccaaagtggtgactaggtgttctcactgggatggctcagagccacaatctcaagtgcctcagttacgtttgtgaaggaaatcaaactgtgctgtctctgcctcatgctctgacctttgctggttgtatctcctgtctactcaaacagcagtgtgttcaagaaggactcgttctctctggtgctcacagactctttggttctctctccctctctcccttcccccaccatcttccctttcctaccctacttctcctacctacctctctctggagagactgagaagctgaaacaatgtatcttctgagtgtcgggactgtcgttatctatcaccttacctagttttttatttgatgctttggattgagcccagggcttcatgcacactagataagtatgtaactctaccaattgagctaagtccacagccctaaatctttaaaagaacatcgtgtatatagaatgtgtatagtactacatgtgtatatgtgtgtatatatgtgttgtatacatgtgtatatatacactcttatttgtgaatgaataaaaaatacccccaccaactaagttgatgactcttcagtagagaagagtaacttttggtgtggttatgtaggcagtttctcactttttatgttatatattgtaatattgcaatagaaattgatattgaaagtccctggaataaataaagatagaacagtacatttatccctataaatcttttaaagagtataaagaaaactaagaaaatgtctttatcctttaaagattagaagagggcattggatccactggaaatggaattacagatccctgtgagccatcatttgggtgctgggagttggaccatggtcctgaaagagcaaccgttgagcagccagtgagctgtctgtccagctagaaactctagcggataggttgttcttattcagtcttggtgctgatttgcacatggctgtttttaccatgcatttgactaagactgaacactcacaggcagctcctctcagcctagttctaacaggcaacttttgcatcttctctctcagattcccttttttgaagagttctgtaaaaagactcaagccggtggtgacgcctgtgagaacctggtagggtattctgcggtgtacagagtctgctttggaatggcttgtttctttgctctgttttgcctgctgaccttaaaagtcaacaacagcaaaagttgccgggcctacattcacaacgggtaagtctcttgttcttccaagggtgtcctagggtctgctcgtcctcactgactgacgttctgctagttgacatttgacactgatgtggggaggatgggctgtgtgtcactggtagcctaagagcggcagtgcctggtgccataataagaaattcagtatacacagggagtttattgtttctactagggtcttcccctgagtcatttccatcctaccgtgaagaagagttttatacaatcagaggccattccaagtgtgcctccttatgggaaaagccactctgtggcactccatcacttccccttgatgtgggaagaacactaccaacaacagaaacatgagctagcaggcggccttacaaggaccttttgtcgcctttgagtatcatttgaatgtctgcctttctttctcttcccagcttttggttctttaaattgctgctgttaggggccatgtgctcaggagcgttcttcattccggatcaggagacctttctgaaaggtacacatggggtattttgggctacccagttactttgttttgacacatttcataaaactcttcaaaaacatggtctagtgtctttgctattttgaactactgattcttttatgagttgaagactgtccaggtgttgggggtttagcttagctgtagtgtgcttgcttagcaagcacgccctggcttggccccagcagttgtatgggagctttgtaaagcagctttacctgtgtgcactccctcccccctttcctcctcctctgcttacaaggagcccgtgagaaggctctgttcctctgctacctaagcaattggaatgataagcttactggcttggagagtaaaggaggtctttaatatttacttgaaaacagatctggcacatcagatccgccactcctctgccgtggaagagtgtcattctctctgagtacaaagcagacctggcagcatgaaactgttgttagctgtgagaactggacaagggacatcctccagtctgtgtccaaactcactgtatgtgaagttagacaccatttgagttgcagttcttactggtgtgtaatacagagccattagtcatatccaaagcagggctccttccaagggaaagaatgggatgcccttttctgagaacaggtaagaatggagatgggatttaaattaaagcgggtcagaatactccattcaacccaaatagattgacttttctagtggagatgagggtcgcaggtaccaaccacacttcattacatctttagggctctatcagtttttcatatactttaaaaaaactggtttaaaaagtctaagtcttccttttatctataacactgttaactagtttttatttattacgaagatacttcatgtatattttagcatatcggagctattatatctatagagagaggtgacctaagagtcctcaggtcagctctagctctatcttattataaacagcctgcgacccacacggtggggttcatccaacagtttagggcagagccaaaaaagccttgaggccttgacgcttaatttccatactggatagccaaggctcattgccagtaagatttaaactgttgatttttctagcagtatttctttttgcttgtgaatcaggccactgtggattgtgtaaacccctgcatctattgagacagctgttagttcagcttgaggttcagcttggatgctccagggccagactctgatgccccagtcctagttgtgccctttcattctagagtgtagttcatggtggaagtcaagacagcaggagtttgaagcagctggtcacatgcctagggaaaaaaaagcaatgaacatctgtttgctgctcacatcactctctctagtttatagtctagactcctctgtccaaggaatggtcctaacaagtaagatgagtcgtccaatctcagtgaacataatcaagataattccctataagcatgcctagaggcccatttctctagtgattctagattctgtcagagacagtagctgtcaaaccagctcacacagacttgcaggtttatctcatgtttatcaagtgcgtatgaggttagcatctaccttgtatggttgtatgggcatgaagtgtattagaggaatgacgagcacaaataaaaagtattgttctttggagttgaatgcacatggtgctcacctctctccctttgggtggtgttcttttgcagtctggcgctatgtgggagctgggggcagcttcctcttcatttgtatccagctcctcctgattgtgcagtttgcacataagtggaacaagaactggtatgtgctgttgtggaaagctctcactcactgacttgaagaaactgtctaccactgacaaaggattacactcccactccgtgtgggtctttccattttctcctctctggtactattttctgtcctctctgccctcctgtcctgctttgccttatgtgcctggctgtgcgcactgtgtggctggctggccatgtggaccatgtgtggctagctggctatatggacggagtatgtctggctggctgtgtggaccctgtgtgactgacttgactgtgggatgagtatgtctgtaccttggacggtgtccaggttccactcctacaaggttagaaagcaaaacaagcacaggcagcacaatgctttggaacaggagatcttctgtgaagagtctgggattgagatagttctcttcttggaaaaaaaatggtttgtctctactttctaaaacatacaggatccctttattgggaaaacttgcatcctgctgtaagggagctgtcttgcctgtaaaatggtagccttttagtgccttggaaacagcattcgcatccaggccaagagggaagtgcctgtcagtaacaaccatccagcccctctgctgaggccatgttgacactgaggtgctgagcaaagtgcttcattgctctggtttgtttgcttgtctgtctgtctgtctggtggtgttggtgatttatttgggtctcttggataccaggtaagtgtttgccactgagctgactttatttttcaaatagtcctcttttatacccagtaaagctattacttttatgtctgtctgtctgtctgtctctgcagttcaggctggttgtaaattaatgatcttccctcttctgcctccagaatactagaattctaggcatatataaactgtggctgccattttatagatttttctaggtatcattttattctatattttggcaaaaaacaaacaactcacaataatgctgtatgagtatgcattttcttttatgttgagtaagataaaacacattgtccaaactttttcaatactttttatttttaatatattcttcagcttgaacattgttctgccctttttttcttaaagataataatgagatgacatggtagctgtggggatgcatcagtggaaacagtgtagtgacagccatgttattactttgtgaatattagattaagtacagctgagtaggaccagattttaaatgttggggctggagagatggctcagtggttcctagtgcatggtgttcttatagaagacccaagattggttcccagcacccatatcagactaacaccttcagcgccagcagataattggattctctcttgtagaggtgttgcgtgtgtgcgtgcgtgcgtgtacacacacacacacacacacacatacactagctcaaataaatctttaaaactgtttacatgctttggtgttttacctctgcaattacaggatttcaggttgacgtgtgtccttgtaagagatagtgcttgctctctacattttgagtcacctttaaaacgatgctgtcatctcttctataggtcaagttttgaggtggtagagttttcttaaagatcagctaagggttgtaagcacatgccactgtgcacagctttttaggtcccactcagcctctcatggtactaaggcaagcactttcccaactgagctacctcctgagcccagcacagcttttctttccccgactttaaagatttattaaattatgtgtatgggagtacttacatgtgtacttactaaccccttttttgattctcctatctgtgcagaatgggtctctagttgcaggtgggcaaggagtcggcgaatgacaaacagaagcaacacagagagtgtgtagaatctgagtgtaatttttcaaatcgaacatcaaactttttatactgaagagtaacaagaaaccaggcgagacacatctgctgagttactgtgacacaatacaaaaggaatgtatacatcaaaagatggcagggaccaggtcttatttaccactaagatgggagccaggtgtaatgctagtctattgttaagcccaccaccaggggttcttagtaaatgcttgatttatgctgtttctttgggcctagggaagaaacctgtctcaggggaattccctaactctttcatggtaaatccatctatttgctatgccattgtgtatattcccttgtttgggtgagactggctactgtcctaagtaatcactctgcagaccagccctgagctattccagctccattctttgtaatgcctaattagttttgctgtctctactagaagtaaatttgaatgttactgaataggtaacattcttactgaattccaagcttgtcaattcaaggattttctaggacgttggaacactggtggaggcttacctatgtcagaattcaatctttaaaagcacttataataaaacaatactgaaagagatcacatggatccatacaccagactaacatggggatagggtatgagtatacgggttatgagaatgccaaggttccaggaggttgagtttccttgaaactctttgcctcctgagtgcttccaggcctctcagtttgttaagcaggcttcactggagtgggcgtagcacatgtcagtgcaggtacctctgacattggattcccaggagtgggagttacaggcatgtgtgagcctcctcatgtacgtgcttgggactgaactcaggtcctctgcaagagcagtaaatgctcttaaccactgagccatctctccatcccctttccctgattctactcactgtatttctcccttagtatttcttcagtttggagaggtggtcctgatgcaggctctttttttttagcacaaagagaaacatactggggctgaccaggcttctgcgagtagagctgtttgcttctcctacaagagaaggtgatctcagagggactgctggcagaacatggaaagacggagaaagctcacagccaactctactgagtgatcatctttacctcatacctcagtgcagccactgtgtttcccagggctgctagcatcagagtggagaagtgctgggctaaagctgatggttgtcctttttagttgatgaacatgcttgggccaggagaggagactcatgtttagaaataattctaagccagtgaacctgcagaatttttggaactttctagctgagataagagtgtaatcattgttgaaagtgtcttaggctctgtggttccagggtctctgctggggctaatcccagtatctgaaggatagaatgctccagagaatggggccttcactgacctgtttttctctcccttccacctcacctacttctttctcggagaaacaggactgcaggcaccgtccgtaataagctgtggtacgcctccctgtccctggtgacactcatcatgtattccgttgctgttggaggcttggctttgatggcagtgttttacacacagtgggacgactgcatggacaacaagattctcctgggagtgcacggtggcctatgcgtgctaatctctctggtagccatctcgccctgcgtccagaatcgtaagcatggtttttttctttttgtttttcctttgtgaattttaacaaacccagtaggtttctttagaagcccaagtcattctttaacttcctgtggatgggactcagcctcctcttcatactccatgcccatttggaggtaataactagatttacttgttatccaaaaaaatcggaacttaagtcaataatagatagacagtgcacacagggaacctttaagtgggaaatgtgcttagtctctgttaagcaagagatgtataaattcagcttattgtgtccttgtggaatttggatggcaaggctcagagcagctgtatttgggattgtcttaggtgactggcaacctgactaagacaggaagcgggaaatcctatcctggttgcttccagtctcatgaccagagtgtacttactgaagtcagcagaactgtctgatcttggccttgctttggccgttgttgagagccacaaatgcagattcagtgggggttgaaagcaccttagaaagtggagctgtgaactgttactaataacctatctatgacatcttaagcaagtatgctgaagacatgctgtcttcagaggtgtaaaagtgtccccagtctggtgttgattgaaggatcttactccatgggtgattgatctacacgggccattccaagttctggataggaaaaggaaatatgggcaaaaatggaaagccccttcgaatctctttccaaagtagtggatttgaaaagctgggcacacctgtgcattcctgtaagcacagtacgtgggaaatggaagctggaagatcggaggtttaaaggcagccttgactgcataggtttgaggccagcctgggctatgtgagactcctcccctttaagggataaggcagcagcaagtactaaatcattttagcaggactaagatattttccatactaagtttttaaccacattacagaaattgatatgattattctcctagttcctgcaattgatcagtttgttcctaaaacaaactattggtaagctgaccagaatcttttttgggttaatcttaccttctgaaacagccacaacattttgcttaatgacattagttctgagggtgtcttgttcccattgcagagagcaccattatgatagcctgttacagtacttctactgataattattattgaataatggtaaataagaaggaatttaactagaaggaagggtgaatcctttcctgtcagcaagtgttgaaaattttagcaaagagagatcccttatccctagattccatagttgctccagatgatcccagtactgagttatcacttaaatattgtactttaagtccctcccagtgaatgtctgtcccatagcttcccttgttagcctaaaccaggttttgtacttagtgtggccaagaatggtttcatttttggtgggatttgttttgttttgtttttacctcttgacagctcaatgcttgtgcttcatggattgtctaaagaccttgtacaacccacaatgaatggtctgtgaaatttgtctattgcaccaaactaaatgatgatggctattttctttttctgatcttgtgatttatgaactaatgttataaatttcatagggagagagactgacagaaggctcagctagcgtaggcgcttgctgctaagtctgataacctgaatttagtcccttagacagagagaactgactcctgcaaattattctctgacatccacacatgctatggctcttgtgcacctgcatgcacccatacatgcatgcatgcatgcatgcaattgaaaaaccactcaggggtctaggcagtatgttgaatatgttacaggttttggagagttgtttatggagaagttggacagattttggcatctttaaaatagcatgaatagggcatattccctacccaatattacatttttttttcctgagacaaacacttcattaggttcccctttctttagtaaaggtgagtgtctaagtttaaggagcatcatccgttggctgagggttgcagggagggtggtggtggtagggttctatttagggtataatgtcttactgccaggacttcaagcctgtcttctgtctgtctctttctaggacagccacactctgggctgctgcagtcagggctcataagctgttatgtcacctacctcaccttctcagcactgaccagcaagcctgaaaaaaaaggtaagcagctctgttcaagagtgtgtgctcacagtgcacatgtctctgttccctagacctgaactcttactgagctatggagggttagagaattcaaagaaccagggttttctatgctttgtcattaagtaaagcctttaacagcaaaaatgaaattttctcctcttaaaacatttttttaattttgtgtgtttgtgcacatgcttatgtgagtgcaggtgccccaggattcagaaaagggtgcctgatcctctggggcgtaattgcaggctactgtgagcagcctggtgtgggtacaagagcagcaaggctccttaagctctgagccctcttcccagcccccggcgtgtattgagttttctggcttgcagagaagagtgaccagagaggagcttcagcagttgtctttaggcctccgctgcattctgtcattctgctctggcaagaaccactttattttagtgttttatcggcttcgtttggttttgaatttttgtttgtttgttatgtttcctacatcaggggtttattctctgacactgagagaggtgggaggagcgaaggtgagggaaacagaagacagtttgaacctggatctgtcactgcctgacaggcaatcccagtgcttgccctagatgacatttatttaacagcgacagcaggatgtagagaaaggaaccagactgcctgagctctgttctctgtgtggttttcatgctgtgaaatgttcatggtgtatgcatcagtcagaacagtagttggcacatggcaggtgcttgtggggtgtggcctgttattagtgtgaaattgttacagtgatccttttgaaggtttttttgaggcagggttatatagtccttgctgatctagaactccctatttagaccaggctaaactcaaaagcacagaaatccacttatctctgttcccccccacacaagtgctgggactgaaggcatgtgccaccacaccaggaaaattttaatctataaaagaagtattacattctagagtcccaaattttcatatttatattttatctttttcccttttgtgatacataaggtgtacatatatatttatatatgcatacaggtatatgaatgtgaatgttcaggaatctttgatccgtacatcaagtaaatatctcaattaaatagaaaataaaagttactaaatttaaaaaacaaatgcaataattatttaggtataggtactttttattggtctgtcttgttttgagagaaggtcttactataaacaagttggcctggaacttactatgtagcccaggctgtgcttgaacttgcagtttttctaacttggccgcctaagagctgggattattggtgcacgccaccatgttcagctggggtctcatcttcatcgttgtagtgggaagtagtagatggaggttttatagtaagtatggcttatcccaagtttaattatacacataaaatctcaatcatgacccagcttaccccaggtcttaaaattttcttttataattgcttatatattcatctctggttttaagttaatggaagttttgttcacagtatattttttaatagcatgtattgctttaaaaaacagtaaaacatttatttttaattttaagtagtaaatataaattttatattttattcatatcttacaaaaatcattccactggcctaaaaaagaaagttttttgaagccacagctaacaaggttctattaactctttcaaagtgaactccagtgatattctagtttagcttcaaacagaatgtgtgtttgtagaacaattaatatatttccatgttttgggttcaaattggcaataagatgtagttagatactcacaattgaagcatcatgtatttttaaaaaaagcaaattgctagtgagagagatattatagagacatttctttgaaattttagactacctcagatggttcccaggtcacgggtcaagggaagccatgtttcttatgtctgcagtaacctgtcttctctggctcaggaacccattaccctgtctctacgtgggcttcccaccaggggactgtgctctacccctctctgcagaggctttggatccagtttaaaaaaaaatcatcataattaaaaacagtgggtttaatgtaggagaagcaagggtgactaagtcctgagtcgtccgtcacacccttgaaggcttaactagaatggggatggggctggcccttattcctcatgtgtgctgatgtgggagagcagtgtcttggaactagcaaaactgcagtctgtgcagcatcagactatagagtagaagttcccagggtgaagggctcagtgttgggaggagtcatgccagcacacttgaatcttcccagacagatgctgtaaggtacagtagatctttgtctaacgtgactgtgtttgcttcgtgttatttacaagtcctggatgaacatgggaagaatgttaccatatgtgcgcctgactttggtcaagacctgcatagagatgaaaacatggtgacttggctgggcacccttcttctaattgtgtgcatctcatattcatggtaagtcctaggagttactgatgctcagcttacaggttttagaatgaaaggaacagagttatttacgtttcagtccctgtccgtaggagaaaactagccagaggcgcagtgttgctgcacagcctcctatgagaaactcctgtgctcattactccactacaggggcaaactgaatacatgcatgttttgttaaaaggcagttttgaagacgagttgctatggcatcgttgaagagtaagggagcatatagtgagaatgatgaaaatgtaccacatgccagagggttctggcaaaactctaatccaaggggatagcgtttgttttgttatcggtggagagaaaacctgggtgttctgtgtatggtccagttacgccaggaaatgttccttctccgttgtgctgaaacctgcaaagctaggaagtaggtaggcaacattgcccaggtctgtgggatatgtgtaacggaagcccgttgtttcaccggcctgtgccagaggagactccactttaaaagcacttcaaagatccctggagggaaaagtcggtgatgggtggttctgggaagatattttccggtactgaagcttcatttggacaggagccttttcagagctgttttacttcagtgtgttgtatgttttgtttctctgtgtaagaaattcaacttgtcatgggcatgctatgattttcctcttgctgaaactaaacaatcatggtggtgacagactgtgtaaacacagagtggaagagcactgacaggctctctaacagtcctgctgagaggaagggccagccagtaagggcctccacactgcaaagggcttactcagaaccatgacctagccaggaaatgcttgctcctgtgctgtgtggctaaagtactggttctctaacgaggatcctcagtctgcctgtgccacctgacagtctttcccttaggtcagaagggaccttggtggttgtcccttctgacacttaattcttcacttgtctacttagtacctgctatactgaaacagagacagttgaggggagatgtctgaatcagtaaagggcttgccgtgtaagttcaaagacctaaagtcggatctccatgcccatgataagagctgagttttgtcacccacaccactaaccctagtgctggggatgtccacaggtgcagtacaacttgatgaccagccagtctagccagtaagcttcaggttcagtgagggaccctgtctcaggagagtaaggcagaaagagattgaggaagatacccagtatgtgctggcctctccatgctcacacatgtatgtgtgcacgtacacacaggcatatacacaattaaaaagaaaaagaaacagtgaggggcattcaagtccatggccatttccagtgatccccagcctcatgcagccactttcccctgctagctagttgattgtcagcttgaaacaagccagggtaatctgaaaaaacaaacaaacaaacaaaaaacagaatttggagaaaaatgacaccattggattggcctgtgatccagccttagttgcattttcttgattaatgattgatgtatgaggacccagtgcacttgtggccggtgccatccctgggcaggtagttgaagtagaaggcaggctgagcaagccatgaggagccagccggtaagcagtgctcttccatggcaagtggtgctcctgcatggcaagcagtgctcctccatggcaagtggtgctcctgcatggtctcagctccagttcttgtcacaagaaatctgtccaaggaatctgacaccctcttctggactctaggacactgcacacacatgctaaacagacatgcatgcaagcaaaactctcatgaacataaagttaaaaaaataaaaatctcaagaatattggtcaatcaagagcgaagtaggttataaagatcattcctttaaaaacattcaaatacacttgtgtttataaaaattcccaggaggggggattggcgaggtggcttagtggttagagcacttgatgctttgcagaggatcctgggtcagttcccaactcccacatgacagctcacagccatttgtatataactccagtcctactgctttctctgtggccacaagacatacacgtggtacacagatataatacataaacactcatacacataaaataaatcttttaaaaagaagcaaacaagcccagaaacccccaggaggagacagccagagttgtggtagtagtggcattagagagaagtgacagggtttagatttgctgcggccatcagtgggaaagagcagaatcctactgggtacacagcgtacattgacagtagtgggagtgtctcacagtgtggactatttacccattcagattttttcctgcttcttagagttgcaaagactcacttttacagctaggcatatgggtgcatgcctgtaatcccagctaatatgggaggctgaggcaggaggattacaagtgtgatgctagcctcagcaatttaaaaaaactctagttttatttaagtcacttttaggactgggagtgtggctcagtggcagagtgatgcacacaggtgtatgcacacacacacacacaataagaggaactcaagtcaaaggccatttccagtgagcccataaagtcaccatgacttagcacagcctttgtgaggatctgggtttaaaatacccaacccacccaagaaagaaatcacttttaattttgtgcttagcttagtggaaatgaatttgcctatcattctgtatgtataaaccctaggtctaatccatggtgttataaaaacaaaacaacaaaaaccaagcataaaacagaaagatcacattttcaagagatagtctgagaattgcagcatcacagtggagattgttagtttgatattccccaaagacattaattttcaaagctgacagctgctatttagaaatctgtctaaatgccaacagcagacgttttctgaatgctggtaattaaactgcagaagtgtaatggccagtggaatgctgggacaaagcagcagcctgcacagagtataacctgctgctcgtttatgcttctgtagcacataggcttgaacgcactctcaggagttggctgagcatcacgtgggggtctggagattgatgcttactgtaatcaccccttgcagcaccaggaggagtcagcttggagaatgttataaacaaacggtttggcatctttgaagaaaggacctgctgctaagggaaggccccagtaacatgaaggggttttcagctatttccagagtttacataaaaggagcatgggaggctggggaatgttctcaagtgaggccacactgtctgcgtagaagctgttatttgaatgattgtaggaatgcttaatttcttggtggaaactgtactgactagaacaccagattataggagaataaattaccagtgttccatgtaaaacccaggattgtctgcggtgacattttgtaatgtcattttgtaataaaaagcttggctcccgtggctcttctcagttccctggaggatccttgtctcccaaatacttccttgggtgccatgactgccctgggtcctcaggcgcttcctgagagtacacttcctctgtgctgaattctctctctggcctcgctttctggcaatgctctctctagaacccctgtgatggaacatcccaggaccccaagagagctcacctgccaaagttccctaagagctggctctattgatccagctgaaacctgtgacaaagtccagctcccaaaggcctctaactccttccttggactcgaggttggagcactattttatttccagctgaacctgtcagactggacaggaccctggaggccttgtgaagaatggagtatgttcctacaactctgtacctcagcttcaggaacctcgggctgagccacctttgttagccatgtggagagatgacatttacatagtgactggtttattatcattagaacaaaacacctgatcaaaaagtcttaagggagaagaaatttatttcggctcatgatttcccagagagtcccagattgctttctattactgtgataaagaccatggctataccgactagactcaggtagtcatttggaaagagggagcctaaattaagagactgccctcatcagactagactgtggataagccagtggtgcgttttctgtatagatgatgacatgagaacttattgtgggcagggttacccctgggcagtggtcctagggactataagagcaagccctgaagaacaaggtaatgaggagtgccctctacacacgctcttgcctcacactcttgtttgagtgtctcctgcccgacttccctcagagataacagtgatctgaaagctgaaataagcctttctcctccaagttgcttttgaagtgtgtttatcacagcgatggaaatgtcaactaagacagtgaccacataagtggagaaaggggtttctttcaccttacagcttgcaacctgtcaaaagaggagggcagggcaggaacacacggaaggaacctagaggcaggagctgaagaagagaccattgaagagtgctgttgactggcttgctgttcatggcttgctcagcctgctttcttgtactacccagagccacctgcccagggctagcaccacccacaatgggttgggtcctcctacttttaccaatttaagctttgcgcgctaatggtctttccagcccaaagttcctaatattttgcaacccttcccagatcaggtctgtcacagcaatagccaagtctttggtgccaatttctgttctagttgctttctattgtgacagtgatcaccccaaagatgctagggtgctaactaagctgggtgacctgcataattagattattaggaaacatttgttttataaagtattccttggctattttcatttagttatgcttaagagaaaagaaataacctttagtatttaagccacctaggaaaatacccattgaatataaaatgggaaagctaagaatctatattaaatgctgagcaacttcctagttcaaaataggacgctcacagcagtacagcgtgccatgtggaacaagggggtatgctgtgctggtaaggacggttggcttaagctgagaaccaacggcatcctgaggagcagtgttctctctgcacagtctgggcctgctgctcttctctaaggagaaaggaatggcggtcatttgcttttttattttagaaatcctgccactgcctcagcagctagccagaactctccatgtctatacatcaggaacgtgggctggcctcctctggctcccacagaattctggtcttctttgaatcactaatcacacagctctgtgggaacatggttgccttttgtcacacaaaaggcatggggtgtgtcccgggcctgccctgtccattttctagtatgaattgaaaggtctgtgatctccaaaagcaaattgggcattttcttggaattttctgggacccgtgggacttcggctcactccacagtgaactaaagcaggtgctcaggtggcgtttgcgctgtgcacgatctgacgatctgacaatactgcagaggttgggtattgcaagggtttctagagagaggggaaggcaggcagtgttttggtgaatatgtaaataattacaaggaacatctgtgtcacattgcaatgtgatgcagctgttttctgaatggtgacagattgcaccacttggggctgttgtccctctcctcagccttgcttcaccacagattatagtgactgacatctgtaatcccatcactcaggaggttgaggcaggaagatggccacaagtttaaggctagtatggactacatagtgagtttcagaccagcaagggcggcatagtaagactgtgcctagaatgaatggatgaatgtgtctgggagctgactttatgggtaaactagttaatatgcaagcgcaaagacctaagttcaaagtcctagaactcagtaaaatcggacacatctcgtgcctgtaatcccagtcctctacagtgagacgggtgagggagagagatggggagcccctggtagctcaacaggagacctggaaaatgggagaccctgtctcaaccaaagtgcaggcaaggacttatgccgcctctcccttcacatgcactcagtgttacacacatacatgcatattacagagacacacacagagggagagagacagagacagagatggggggcactttaagagtttacagaaccatgtttttgttaataattctcatgagttttatggggatagtccttttactgtggttgcctctactctgcataaggacaagactgtccctacggatgaagtgaatgtaaatagtgttagacagaaaacgaaatcctcccccattttagtgccatctggtgcaaagaatgaggtgtcaaaggtgcttgaatcagaaggtttgtcttcccaaaactttattccaaagaatttatggagtagtgatggaagtgcttttaaagagttttcctcaatttccagccgaaaacttcagatactaaaattaaaattttgtctttccccaaggaaacttcctactgtactatagtataactggcatgcagaagtcttgagtgcataaccagatgagagtgttcttccgaatatggccagtgggaagtttttgtccttcccttaccagtcgggatggagtagaagaattgtggattggggtctggatcccagaggacctctttttctattgctccccatagcccattgataccttttctccttgggcaggagactgaggggacagacaaggccctgctgcttcctggttgaggctgacttgatggacatgaatcttaatctctgcctgtgcactaggagcctaaccgcatgagcagtcacccctgtgtcctgtgtcctcgtaaacttgcttctttgtgagctacattttcacagacgaggccctgaggctcagaacaggggctgccacacgcagcacacttggcctttagggattatctgcaaaatgcatgtataaagttaggctaagtgttgaatatatgtttgtttaaagtgcttccatgtttttatatatgggagaaatgagcacttttaccattgtcagtcaatgttacagattgttttgcctctctagatatggaggaaagatagggaaagattttgaaacagggtgctgtgtaggccaggctggtctcacattcattatgtagtcgaggatggccttgaatgtctgatcttcatacctcttcctctcgggttgtgattacaggtctttataaccacacacagtttatggggtgctgggaactgaacccatagcttcgggcatactatgcagtcactctactagccgagggacattgcctggacttaacaaaacaaataacttttgatctctaagtgagactggagagtggggtggtgataaggtaaaggtagaacatgaggagcagcaagaagccttgttgagaaaagactgacaatatctgcaaacttgtgtctggataaaatgatctagagcagtgtgcttacaaagatagttgtggaatccaccatcaagcttgctgtcaaatggaatatcacagtagcttgtgttcatccttcagtgcctgctgtgaggggactggctccaggatcctacacccctaccctatgccatcctaccctgccaccgacaccacgtcaagtgcttacatatcgaatggtagaggcagaattctacataagctctacgtacatcctccagatgtgctaaattgtctctagatggtgtgtttgatatagtgcaaatacagtataaataacataagacatcattacttaggaagtaagagcaagggagaaaaacagacgcacccctgcccacctagacaccgttatgcaaggttaaataaatccacagatggagacacttccatcaagtgtcaacgggcagggcgggagaggggcgcccagagctgagggcacggggagccttacaggccgctttccctccactcagatgacagcttctccctgtgctcttgcactctgttctctcctagtttgacatcgacaacaaggtcgagctcggatgctctgcagagtcgatacggagcgccagagctggaagtaagtgcgtgtccttccttctcttccggcttctgctcagggccctgttctcaggagagccttttgtgcatttgttttttgtttttttgttttttttttgttgttgttgttgttttttttttaattaaaagtaagtttttcatatagaatattccaatcatggtgtctcctcccttctctcttcccgccccccacaccctttatccacccaatccaactccatgcttctctctctctctctctctctcacacacagacacacagacacacacacagacacacagacacacacacacacacacacacacacacacacacaccaggccaattaaaacaaaaatccaaagcaaacacaggaaagagaaaacacacaagcaacacttagacacttgtggagatgtccgtggtgcccgtatgtatactaagcctatacaaacacagactcagaaaggctaacaggtgagccgtgctgaataaggcaggaaatgctcagatgaggcggctacacaaaccccattgagcttgttttgtgttggtcatctttgcctgggtgtgggcctgggcaggagataagtataagtctggcttgtatacccagtgagaagactaattttcctttgcagtgtattgattttttttttttttggcactcatagttctgtttttctgtctaagaaagaataagatttttgtatacaaaaagaactattgtcctatgtgttaaaatgagagaactctcaatttttcgtcaacagtgttgccactggcttggcactctgcacccaccccgagtctaaagctcggggaaccatgttcagccaccccttgtttagtctctttggctgtaatggcgtaggttttctgtcagttctaaaccacacacctgcttgacgcccgtctgcattccccacgtgcagcgtagctgtggggttatgtatcagcgctctggaggaagacacaggcaaggaagagagccaagcacgttctgcacacactgcacataccgcgggaacgctgacacctcagttatgggtcagttccagcacacacttgtcattcagtgaggaactgtaagcgtatagatcaggccattcacctccatgtcaaggtctgagggagtgtttagctcactgtcaaaacatttcctgttttccctttcctgtgtagaagtcttttttttttctggagctcttggtgaaacatgaaccatagtcagaaaactcaaccatacaggacagttaagatgagacttggcagccagggtggcggtggcacacgcctttaattctagcacttaggaggcagaggcaggaaaacctctctgtgagctcaaggctgcccagaacctggggctgcagtgactgctcagtcatttagcacttacaggtgctgactgtctaaagccgtgtagtttcacatcgtcctcacaaaagcagtgttccttgcatttcacagagggaagagcattcccatttcccaggatgggcccttgggtacgtgttcttgactgcgcattgcctgggagcaccactgctgtcccagcccctcctgtcccagtccctgcagctgactttgctggcgtctggccactggatccattcaaatagcatttactggacggacaagccctggtgtctttccagatatggatgggcacttggctctgcagctggccatttgggatgcctttccagtgcctagcctagagatagtgcaccattatgaaggcctgttatcctgccagcctcagaatgcagaggaggaaactgtgctggcttgaataggttactgctgtctgttacagaggagcatgctctgcagaagccttctttgtgcctttgttcctaccattgactgggtggccacctgctgggggtgtgagcattatggtttcaatgtctcctttgtgtacagccttcaagctcaaacagcagcaagtccccaggttagatttaagagagaaagttgttctcctttgagggagaagccgcccactgtttgcttctaagcaagtgggttcgtgcccccacatcattgcctatgaaagaccaagctcatgttttctgtggtaacttaagcttcaaaagaaacgggaatgaatagagtgggcccactgacttctgaactgtagactgcctcacagcatccaagtcttgtggagcaggaggaagcaaaagctccagcgggacttgagggatgaaaggctgtgttctcctggccctcagctctggctctctgggatttttgtagctaagccctattccatagagataggaaagaccattgcttctcagatggtcttggtaagtgtagtcattccgttctttcttattctgtttatcagtcttcctgcaatcatgtaataaactttcataattttgtctctttttctttgagcttactgttttgaacaagtaggaattatgatataaaattcaaaatgtactaaagaagcaagaattccagccttctgtatccacagccagatcagcagcctgattgcttattttgtttgatttataagaaaggatctcactacataacccaggctgactgctttgaactctgcggctcctgggctagtcttgagttcactgcactgctcggaccatccattaacttgggattcttctacctctgcttcctgagttaggacaggggtgcagccattcccgcccaccagctgcctctaatctgcccttcagatttatcccattcccagttcagcttgtcagcttcagtgccctgagtaatcacgaatcccaaggtctcgttccgcatgtgtcccagctctttttttttttttaagatttatttatttatttattatatgtaagcacactgtagctgtcttcagacactccagaagagggcatcagatctcattacggatggttgtgagccaccatgtggttgctgggatttgaagtcaggacctttagaagagcagtcactgctcttaaccactgagccatctcttcagcgccccctgctcccccccccccccccagctctgtcttaaagctagtttatgacttctggctgctgtttaatttgcctgatttcactgtcatccgttgtgagcatgatcgtagtcccagcccctgaggcagaattgatgagtagcaggcctcacactaggaagtgtgaggcaggagcatggtctcttttgctgcatgtttcagtccaagtcgtgcagaggtaggaactgaaacagaatgtctcagttggtaatttattagaggtcagcacatgcagaagagagaaaggagagaggaaggagacagaattaggcacagtataattaaagttaaaagacattataggctggactaagcccagggcatgctcccaagcacaggtggtacctcagagtgttctacatgtcctgttagctgggcctttatctgccttccatgatcagtcatttgatggaggatacacagaagggcctgctatgggacgaggcagctgtgcagccaaagcagtgcctaagtgagctggctcacaaggatttgcttccagaagtcacacaatagctagctagggtgagcactaggtcctttgaaggggacctggctagaacatccccatactcttgagggctgtccctgttgctgtacctagtgtatctggggacagagacatagccaaatctcttgcactaacatgtacgtctggtagaagcttttccagtcgggcggcatacagtgctagggacgtagaaagcagcatttgacttggtcgcttttgttctcacaggtagcccggtgctgtttctgctttggtccagatggagaaggtacgtgttctgggcccgactgtggccctgcaggctggggtttctctctgtaggcatttgccgttcaggtattactttggtgcctaactctgcttgttccagagctggttaactgtctatgtacttctcacatctctctcagggttttgtctgtttcattggtattctggcagggaaaaaccactgctcactttggttcttatctaaggtaaatgagagttagaaaatacaacgtgtatatgttttttaaagggatgataagaaaatgcaagaggtccctacatctcatttgggagccatttcttttcttcagcttgcttttctttacagaagggaaagtttatgggctgctctctctccactgagtttctaatattctttatgtcttcgagggctctctttctgctgccccactggaacgtatttgctaactcatctagtcaagcaagttcctggggtaacagagctataagtggcctttgtggctttttctactagcagcacattcggactgaaatgtgcacgcagctgcagtagtactgatcgtatgtggactcaccactgcccttgggcatcctttgtcatccacagacactgaagagcagcagaacgtcaagaagggacccagggtgatttatgatgagaagaaaggcaccgtgtacagctactcctatttccacttcgtcttcttcctggcttccctctacgtgatgatgactctgaccagctggttccagtgagtggcctgttcacagccttgaacccagctcagtgggacaatctctgtatagtaaaataacacaacaaaacaaaacatctcagtatggttctctaaagagtgaagtcaatctgtactctccttagcctttgtagccaacccctgacattcttcctggtagaccagaagcctttctgagatgttgagtgtactcactgcagttaagttgaagttcccgggagcggggggggggggggtgctcagaggcagagggtgagctcaggatgtgagagaccttcagtctcaaccctgtattgagaaacagaacaaacaagacaggaagggctaagtccacatcgcaagtgtggggaacactgtcatagcaatagaagaaagattatcttaaagactaatacagtggggttttttcctacttcaaaataggtatctcttatttttccagtttttaatttaaccaatgcccaatggatttgagttttcctacctggagattcatgcagccccagactcggagtcatatgttgacgtgtagtttagtgtttgggtggctcttctgtgctgcactgagatgtaagctctcgtgggactggctgaccatgagccacggcgcttgactgtcaggtggtgagagctgaggaggaggctgtcagggaacaggagctgcagtctagagcctagagttagcaaacacttccgggagggcattcttcctgaggaagggacaaatttgttgtttcctagtgatcttttaaaaactggaggaattttggcttgaaacagataagaaagtatggacagagccaaaatcataaagacgagatggtaataaacattgaagataggtagaaattggagccctctttacattgctgataggaatatacgatgaaaacacatttgaaaatataatttggcaactccttgcatggttcaacacaagatcctagtgtatagtccagcaatttccctcctaagtatagatctagtacaaaaggaaaagtaaccaaaaattatagacatatgctcatgtcatagtgattcataacaacacagaagtcaggggtagctcaaatgtccctaactgacgaagagagcaaagcgagctatttccactcagtaagataggatttataaatcagaaggagtgatgtacagtgtgtagccccagtctggaaaccccaaaatgttctcagatctgacaagacatggaaaggttaccatttccaattttggatttgtttacctgataacatctatttaaatattctagagtgaaaaactcttaaagtttggtctcaggcttctcagccaagggacacccatcagtgctgatacacatacaatgcacagagctctggaagcaacatgctatgtttaaaagccaatcataggagactgtgtgactgtgtttacatgaattggtctaaaaaagacaaatgctatagacaggaagtaggtaaatggatgcggggtgacggaggacatgggaaggggagcagctgggggatgcaggatgtctgggaagaggaagctgttctaaaactgactagcaacaattctataagcctgtaagtattggagaagttggcaaatgataccttttaagtgtatatgagttagaactccattaattactaagaaagaacgttgaagtgtgctgggggccagcagtgccttgctacctttgtgttcttactgctctatctgtttctcaacagctatgaaaatgccaccattaagaccttcttctcaggctggtccgtcttctgggtcaagatggcctcctgctggatgtgtgtgctgctgtacctgcagaccttggtggcccctctctgctgtccctccaggcagttctctgtgtgaggatgtccaggtgccctgtggctcagcaggcctgtgcccactgtggagggctgccctttgaacgtgtgcaccaggggtttaagcagcaactggtgccctgtgaaaagctgacatcccctggctagcttaagtaggtctgacaaagctttcaggaaacaaacaaaatctcctgattagcttctagttgtaaaatccaaaaggaaactaccagttagatcgacaggaattgaaatctttagccaagctggtaggtgcaattatctctttatgccttacccaagaattagctgaagttttgttgctgttcttcctggacgtgttttaaccaggccagagcttggggcacagcgtctgtcacagggatgaaaatgtccttgtatggcctgtcactctcatccttggcataaagaagcaacaacaaaaacacttgagtcctcagcctaaggtggggcttggcccctgtcactcacctttgcctgcctcccagagccctcacagttccctgtttatgcagagtacagagggagcccctcctttgactccaccctcaactacttctgcacatccctgccccagcattttctgttgaggtcatgatgctgggagtcatggccttcttgtcctctctgcccttggcagaggtccttcattcttgtctaaggtagtgtttgtaataatgtgaaaagcacaatttcttctcaccttcatgggatgctccaccatgttttccctacccagtacaagacactgcagtaatcctgctcttatttatggcagtgttcatgtgactgtaaaacaagatgcatgttgttgtctttgcccaagtagtggagggttgcagttcttacttgtgagtgtcattaacagtaatgctttaagggtcttaacaaaaacgttgcttctttactgcagcttgccacacccctctcagtgttaaggtcagcccccctgactcacccccaccatgaggccttcctcacttacagtgtgcccccaatgctaacagcatggtttccttgaagtagaggagggctggggtaaggttcccaagcagcttccaacagagctggccacacagatcggccagacaagctgtgcaagtgtggaattaggctgagatgcaaaagtcggtggttggaggcatctcacaagactacgattacatccatacaaattcctagatatgcttttggaaagcagtgctcacaagtgtgcattttagtgccaatgttcatagtgagggagaggatttccccagtgcctatctgaacaaatcagacagaattgggacccacataagcctgattcccacaagccaaaatgtcagaatcttcatttctactcactactgtaccctcctgctaaaaggacccacggaaagaaatagtggtgaattcagtggagagcttgtctggtttatagtatttgagatcctgtcttaaaaggtacacacataaggacaccttgtctgtaaactctcagcagttcaaagagaggagaatcacacaaagcatagctgtatactagctctaaacaagtctagttaatccagtaggaatgggagcctcatcatctggggcctgtgtaaggcagcagcttcgttgcagcagcccctgctgtgctgaagaaaggaggtgctgagagagaggcagagaggaactctgctggggggagcaggattgttttgccaaggtttgtctctgctgagactggaagccaggcgtggtgacttttgaactggtcacagccaggctgacgaggccacacatacctgggctagcctttgttggccccttttcctctatggaaagcagctcagggaaacccagacagtaccagtggctgccccggtggcttccctctgaaccaagccccattcactttctagctgcctaagtcttggttgagtacatgccctgccgttcttcagaagttaggcctcacacaggacgaagagctggccaccctcttctttactctcagctaatggtataaatggatggtcagaattgagatgaagggtttctaagagagatatacataagaattgatcctttaatctctgctgaagtgagggagtctctggtttctagggcagctagaccctatttcaaaacaaaaagttggcatttgtgatcagctgtgagaaactactcaggtagaagcctgtttgtgagcttaggaatactattgtttgtgaaactggagaaaactggaaagtgtgccattgttttgagataacaacagcaatgttaccttgcttttaaagataacaggcctttgcttcgtgcaatacccaagcaacactatcaaaattcatgctttgaagctgcccatctgaccttagccatggcagccctggaggcagagtttagaaatcatgtgttctctccctctagtgttttatgagtaaaatgttagttatgccatggagggattctcctgggagtctcattcacacatgatgcctgcttcaagtttttgtggtgctggatagctgatctgggtttcttgggaagtcagcagatgaattgttctgcaggggtttggggaagttttatggagtgggtggactgtggtatggaaagagttgtggggggagacatggagtattgagacttctggttccgaatcccatagggagtggccagtgggagacatagtgccatgtctccagttccacggtgacttcacgccagtgttaattgcccccttcccaaattgtcaccctctgtctttatccaataatgttctcatgccgtccttggtgcttcacgttaccctggaaagagagctccagagcttgcatttaaacttctgggcatctctgcttcaatgcctttctaaccagtggctctttttcgtgtgcggaaacataaaccagtgcacatcccacatactgccaagaagtgaaagggcttcataaggaagatgggcaccagggaggaccctgggcttcctcctcggacatgagcttgccacctggtcatatgctctgaaggtttcttctgtgactgagactagtaaacattttattccctgcagagatgagctgtctggcatgggggtgacttcagtagacaggagagccgacatgatggctttagctcgttctcacttgccgttttccatcactgaggcattcacagagacagttactttaaaaggctgaaacacttggcttttaccaaagaggtgtatctgattttgttttagttgggcaagggcagaactggaatgcatttgcccaattgacttcaagaagtttaactacattcatgtgaggaaaatgatagaagtctttaaggtaattctttaggatcctgggaaattctctcaggtaaagaaagattacagcagatgagtaatatatgtcttgagagctatttataaaaattgtaagaggatcattttgtttccatttattaaaaagttaaacttttttactttgcaaagaaaatactacaaacatttttatagtcataactgttaatttttttaaaaagacttttttttttggaaacaattagctgtagccaaattttgtggttacatttttgctatagtggagtttgaatgcaatctgtgtggtaagtctactgtttgtttataaaggtctctgacatggttagattttgctaccttttaaaatagttatttttccccattagccacaaagccaattatggatttgtatttgtgtttttcaatgctaatttttctatgaagcacctgaaattgactagccttttcctatgtagaaaactcaaacatgttaactctgtactttaataaaatgtaaacttgaaatcatgttgtttgttttctattagacacctgactaaagtctccagttagcctttgccagagctagtgccttcttatgtcaaccagagttcaaacattttggcagctatactgatgatggcttgtgattgacaaataaaaatgggtgatttgtggtatctaatttaaggccttgaagtacaaatagaatggctaaatcaagctagttaacatgtataacttttttatggtgagagcacgtagtccacctgtgtaacaatttaaaatgctgttagatacaatcatgtttcagagcacttcccttgaacatagttcttcgaagcttagctgaaattctgattcttcaacatgactcaaaagtccttggtaaccagttttacaatccacttctgtgttgacctcatttgttgtttgtgttttaggagctacaagttgaatacagagcttcatgtatggtaggcaggaacaatatcactgaactacagcctagacaccaagtctaaccttggctttcttaagacaaatttcactgtagctgaatgttactaaaattcatccttaggggaccataaaagggaccccttctccataggtcccagcctcaagcagatatgattctgccaaagttcattcaagggagacaattagtttatacttctttatgaagatcattggtgagtggttacttatagaggtgtgggtgttccttccctcaacaggggaaagcctttgtccagcaagggtgagggcttccccgtagccaaatagatggtgtccccttcctgtagtgttccttcatctttatactctcgagcctcccccaaagacacatgcaattaaggcagagtactgcatactcagataagggtcctgtggccctctctgttcctccataatggggagtaatcaaaccatcagcaagccctgtcgtgatgatcttttagcaaggggagccactgaactgcccaggatggtggttgctccacttggaggacagtcaactcttaggtggcctgatttgtcgtctacacttgcactgtattgcttaccaatgttctacatggtcattcaagtcacttcatattacaggagttccttcattttaaaggctcaatattccattgtgtgtgcctcacattttctttgtgtattcttttcttatcaagaagagtcacaagaccatctggtaaaacagaaataggagactttagcagctatcttggaaaatgcaattcagcacaagctcttgtggcttactgtctcattcaaaggaagagctgaagtctgtgcaggggtctattaaacaaccctctcccctgctgtcgttgcttcagccaccttgcacacccctgtaaccctctccatggccagtctgtttcagcatccttggtttccctgctgcttaagggcatcagatgtatactcctcttccaagaagactccttgggttgcatgcagtgttcttcccaccctgtgaccccctccccgacctccctgctttatcattttacatagagaccattgccttctgtcttagttgtttttttttttttttttatagctgtagcaaaacactgtgacagagacaccttataaaagaaagtgcttaattgcacttatggttccagagggttatggtctatgatggcggaacaaaggcacagaggcagtgacagctgagtgctcggatctggatcaacagtcaggagccagagcacatggagagtggagctagttctttgaaacctctaagcctgcctacagtgacacacttccttcaccaaggctacacacctcctgatctttcttaaacagttctaccacctggggaccaattattcaaacatgagtctttggaggccattcccacataagctaccacagcatccagcttactgttcgtatttgttcacatggtccctgggacactaaggtccttcaagcttcactcaggtatctctgatgcctcgaatggtactgctcatgttctggtgttcagtgaatggatgaaggagtgaaagaaggatttgtgagtagtgatggtggaagatgaggctgttgaggctttgacatccatggagggcttcacacgctaattaaaatggctgaactgtttagtgaggtatggactgtggtgatcagtaagggatggacaatatccttaggcatgtatgacccataggtcctggatagctcatacacgttagtattgcaacatagatcctgtttaggactaggattatggctcagtggaacagcttgtacttagcatacttaaggccctgagtttgatccctagggtatatagataaacacataagtatgcccttgaaagttaatttgaaaaatacagtaagggctggagagactgcctagtggttaagagcactggctactcttgcagaggacccaagttcaattcccagcacccacgtgctggttcacaactatacataactccagttccatgggatccaaaaactttttctgagccttgcaggtacaaagcacacatgtggtacacatacatacaggcaaaacactcaaatgcataaaataaatgtcaaaaaaatgtggaagctctctatggtaggatacacatttaatcccagcacataggcaaaggtaggcaaatttctgagtttgagggcaacctggtctacatagtgagactttgtctcaataaacaaaaccatagaaaacattgacaaaacagtcaaagaaaatgcaaaatgcaaaaagctcctaaccccaaaacatccaggaaatccaggacaaaatgagaacaaacttaaggataataggtatagaagagagtgaagattcccaacttaaagggcgaataaatatattcaacaaaattatagaagaaaactttcctaacctaaagaaagagatgcccgtgagcatacaagaaggctacagagatccaaatagactgtaccaaaagagaaattcttcctctcacataataatcaaaacaccaaatgaattaaacaaagaaataatattaaaagcagtaaggggaaaaggccaagtaacctataaaggcagacctatcagaattacaccagacttctcaccagagactatgaaagctagaagatcctgggcagatgtcatacagaccctaagagaacacaaatgccatcccagattactatacccagcaaaactctcaattaccatagacagagaaaccatgatattccatgacaaaatcgaatttacacaatatctttccaaaaatccagccctacaaaggataatagatggaaaacaccaacacaaggaaggaaactactccctagaaaaagcaagaaaggaatctctcaacctaaaaagatagccacacaaacataattccacctctaacaacaaaaataacaggaagtaacaatcacatttccttactaactcttaacatcggtggactcaattccccaataaaaagacatagactaaaagactggatacataaacaggacccaacattttgctgcatacaggaagctcacctcagtgacaaagacagacaatacctcagagtaaaaggctggaaaacaaatttccaagcaaacagtcccaagaaacagcctggagtagccatttgtcttagtcagggtttctattcctgcacaaacatcatgaccaagaaacaagaaggggggagggggagggtttattcagcttatacttccacactgctgttgatcaccaaaggaagtcaggactggaactcaagcaggtcaggaagcaggagctgatgcagaggccatcgagggatgttactgacttgctcagcttgctttcttatagaatccaagactaccaggccagagatggtcccacccacaaatggcccaacctccttgatcactaattgagaaaatgccttacaactggatctcatggaggcatttcctcaactgaaactcctttctctgtgataaccccagcctgtgtcaagttgacacacaaaaccagccaggacaccattctaatatcaaataaaattgactttgaaccaaaagttatcaaaaagtataaggaaggacacctcatactcatcaatggaaaaatctagcaagaactctcaattctgaacatctatgctcccattgcaaggccacccacattcataaaagaaactttacaaaactaaaagcacacattgcatctcacacaataatagtgagagatttcaacaccccactctcatcaatgaacagatcatggaaatacaaacaaaacagagacacagtgaaactaacagaagttatgaaccaaatggatctaacagatatttatagaacatttcatcctaaagcaaaagaatgtaccttctcagcacctcatggtaccttctccaaaactgaccatataattggtcacaaaacaggcctcaacagatgcaagaggattgaaataatcccatgcactctattagataaccatggactaaggctggtcttaaattccaacaaaaacaatgaaagacacacatacacatggaagctgaacaaggctctactcaatggtaacttgctcatggaagaaataaagaaagaaattaaagactttttagaatttaatgaaacggaagccagaacatatcaaaacctacgggacacaatgaaagcattaataagaggaaaactcatagctctaagtgcctccaaaaagcaactggagagagcttacactagcagcttgacagcacacctgaaagctctagaacaaaaagaagcaaatacacccaagaggagtagacggcaggaaataatcaaactcagggctgaaatcaaccaaataaaaacaaaaagaactatacaaagaatcaatcaaaccaggatctggttctttgggaaaatcaacaagatagataaacccttagccagactaaccagagggcacagagacagtatccaaattagtaaaaccggaaatgaaaagggagatataacaacggaaaccatggaaatttaaaaaaaaatcagattctactacaaaagtttatattcaactaaattggaaaatctggatgaaatggacaattttccagacacatgacaggtgccaaagttaaaataggatcagataaaccatctaaacagtcccataacccctaaagaagtagaagcagtcactaatagtctcccaaccaaaaaaaaaaaaaaagcccaggaccagatgggtttagtggagaaatctatcagatcttttaagaagacctgataccaatactcttaaaactatttcacaaaatagaaactgaaggaacactatccagtttgttctatgaagccacacatatgattatacctaaaccacacaaagacccagcaaagaaagagaacttcataccaatctcccttatgaacattgataaaaaaatactcaataaaattcttgccaacagaatccaagaacacatcaaaacgatcattcaccacgatcaagtaggttatatcctggggatgcaaggatggttcaatataaggaaatccatcaacgcaatccactacataaacaaactcaaagaaaataaccccatcatttcattagatgctgaaaaagcatttgacaaaattcagtatcccttcatgttaaaggtcttggaaagattaggaattcaaggcccatatctaaacatagtaaaagcaatatacagcaaaccagtaaccaacatcaaattgaatggagagaaacttgaagcaaccccactaaaatcagggactaggcaaggctgcccactctctccctatctattcaatatagtactcaaagttctagctagagcaattagaccacaaaaggaggtcaaagggatacaaatttgaaacgaagacgtcagaatatcactatttgtagatgatatgaacgtatacttaagtgacccccaaaattcatctagtatatatataataaaatagtgatgttgaaaacatgctgaatgtgttctggatttgtcacgtgaaaaataatttagaaaatactgtgtgctataatagaaactgcacatgtgcatttgatttgtgtacatgcatgtacatgcacacatatacatgcaagaaatagttcaagtagctagatgtggtagcatacttagaatcccagaagtcatcatgctgagtcagcagagtggagagttcaaggccaacttgaatcacatgaagaggctctctcgaaacaaaatatttcaagtgttcacctgtaatctttgtggcgctgtcctgccctgtctcccagccttcatattatagacactgtttataaggctcaaataggaacagcctttccacatagccctgtgtcagctgcagctcactgaaccaggactttccctccaagctgagcaatgggcctctctatgcaaagttgtaactgtggatgttaaggttgctgctgcctttgccagcaattagagggacagggacacaacttcacatggccactctagcagcctgagaacttcctgagggacctcaactcagggaaacacaggacacttggctttgatttcaagattagccagtatgaagtagggttggtgttaagaatagaaatgtttcattctttccatgagcacatttctggtgagagtcttagaaaaattttaggcttataacttcaaaggggaaaaggcccttaagtgaatattgttaattatagtgaaattctcaaaaatttttagatggtgataatgaaaatggaagacatgttgtctagttttatgtcaacttgacacaaactagaatcaatagagaaaatgttttcataagattagcctgtcggcaaatctgtagggcattttcttagtaagtggttgacacgggagggcccagctcactggggcagtgttagccctgggttccgagttgtataagaaagcaagctgagcaaaccatgagaaacaagccagtaagcagcaccagttccttccttcaggtttctgtcctgcttgagttcctgccctgacttccttcagtgaaggacctttctttcccaagctgcttttggtcatggtgttttatcgcagcaatagaaaccctaaataagacaggagctaaaacttgtctgggtggtttaggatgagaagaccccaagagaatgaatcacctttttttcttagctaaaggtcaggaaagtccttgggacctttgtaagccttatctctgccagaggtcagagatgccaaacgtgtagggggctaggatccatgatctggtgcgtaaacgagattttgattatctcttcagaggggagaaagttagcatggcaatagggaaatattaagggaaagtgcctggtcaggaggatagaaccctgttctgggtggagacctaacattctgcataacagcatcaatgacctggttaaagaaccatgtctagggttttgtggacactgctgtccctgttgcctcttgctacagccatggtcatccccactgggtacttagacatctcagccaacggcaagcgctcggaccacatctcctttgagctgtttgtggacaaagtcccaaagatagcagaaaactttcgtgctctgagtacttgaagagaaagggtctgtctattagggttcctcctttcatagaatgattccaggattcgtgtgccagggtggtgacctcacacactgcaatggccctggcagcaggctcatctacagagagaaacttgaggatgagaacttcatcctgaagatacgggtctgggcagcttgtccacagtaaatgctggaccaagaagtgcttgactgcactgctaagactgagtgccaggatggcaggcgtgtggtctctgggctggtaaaagaatgcatgagcatcgtagaagctatggagcatttagggtccaggaatggcaaaaccaacaagaagatcactgtggacaactgattcttttgcattatgggcatcttatccactaggccaccccttctgtagttcaggagagtgcccccaccccatctgttcacaataatctgtaatttctgctctccctgaagttctttgcggctcatgtctttctcatgccccttcaagtctagctgaattgcagggttaagcttatgatcatgaataaaaactaaataaggggaaaaacatctctaaaaaggtgggttcaccttaagctgtactaaagagacgggcagaataattatccctttaatgagattctgtactttcccttccagaatcatgtgtccagtgacctgggcctaagagaccaggtcctccatccttctgagtcccgactcagaaaggcacagcttgtccttttccttttctctctggatcatttgtgtcacctagaactgaagtgtgctgtttccatactttaggcccccttactctctctaaagctcccacccccaccatggaactttcatgccaccataactcagacagcatggctttccccttatcctctcctctccttttcccggtaactggcgagatttatggcttccctcccctggggtttttccttgtaagtgctaagaaaattgtccacaaacttctgcttgaatcctttcttcaattcttttgttaaggagacaaagaacctaaaggtaggaaggtggttaatttccctggtatctgaagaggctttaactacatcctgctaacttcccctgctttctatccctcctggcattgagctactaagttaaaaaagctaaagtcctatgtgattgaggcatcatagtctccaaaggaaaggtcacttgcaaaaggtggaagactcaaacaggtgtgcagaggagcaactgtaggagagagggaaggagtgggcgaatgttctggagttcctcctggtgtccttcctttggttctgaaccacattggggggggggcagcttgataaagtgatgccaaaggctaacatctgtggagcatttctatgactgctgccattctcccaacgactccatggctgttggtgttctaacccctttaatcaggggaaaggcagagtttctgaaatccttactaagtacatttggtttcatagacactgccaaatggctccctctcccagccctgtcttccacctctgctttgctctccattctaccccttagggtaccccaagacctccccatgccttccttcttctcatatttaggttttcccttggcctttctattgtgtaatgctgtgtcaggaaagtgttgtattgctgggctttaaacctctgggaacttggtttagttgctcttgaatgtccaaccgtagattactgtaacccctcagcgggcccccaggcactgctttgcagatgtgtttcatttgtcttccagccacaggcccatcatggtcagggttggatacttagcgcatgttttaggaaaggaaatatcaagacgagtctggaatatcatattattgccaggaccccaaaattcttccaacaacttttggatgacaagctaagttatgtctagttaggaattttatctggagctgaattttgctgtatgctgtagtattttgtgtatatcttcttgctttttaaggtgaacagagactgatttttaggtttaaaacattagtcaaaactccataagctataggtagttaagtttgtggtctatccaaatgtttaatttataattgtatcttagctgcttaggaggatttttgtctataaatcagaaataaaatgttgctttgatggtgtgtgtgtgcacgtacctgtgcatgtgtgcatctaaacacaagagcgtgcctaagtgttcatgtgtacatgcatgtggagtgtggaggtcagaggtcagcctcagacgtcgttcttctgatgctgtctgccttgcttttgagacaggatctctcattaacctgggacttgcccagtaggttagactgtctggccagcaagcctcaggatttgcctgtcgctgactctccactcctgacattttctgtaggctctagggactgaactcaggtcctcaagcctgaatggcagctgctttacctctgagctcttt

SEQ ID NO: 1711 - DNA, 5174 bp, Mus musculus
ttggcctgctgttgcggatctgctggctgctccctctgctgtggctgctgccctaagttccgacagtctcggaccacccgcttcatgtatttattctacttcatcctggtcatcgccctctgctgtgtgatgatgacaccctctgtgatgaagcaggtgaaggaccacattcccttttttgaagagttctgtaaaaagactcaagccggtggtgacgcctgtgagaacctggtagggtattctgcggtgtacagagtctgctttggaatggcttgtttctttgctctgttttgcctgctgaccttaaaagtcaacaacagcaaaagttgccgggcctacattcacaacggcttttggttctttaaattgctgctgttaggggccatgtgctcaggagcgttcttcattccggatcaggagacctttctgaaagtctggcgctatgtgggagctgggggcagcttcctcttcatttgtatccagctcctcctgattgtgcagtttgcacataagtggaacaagaactggactgcaggcaccgtccgtaataagctgtggtacgcctccctgtccctggtgacactcatcatgtattccgttgctgttggaggcttggctttgatggcagtgttttacacacagtgggacgactgcatggacaacaagattctcctgggagtgcacggtggcctatgcgtgctaatctctctggtagccatctcgccctgcgtccagaatcgacagccacactctgggctgctgcagtcagggctcataagctgttatgtcacctacctcaccttctcagcactgaccagcaagcctgaaaaaaaagtcctggatgaacatgggaagaatgttaccatatgtgcgcctgactttggtcaagacctgcatagagatgaaaacatggtgacttggctgggcacccttcttctaattgtgtgcatctcatattcatgtttgacatcgacaacaaggtcgagctcggatgctctgcagagtcgatacggagcgccagagctggaagtagcccggtgctgtttctgctttggtccagatggagaagacactgaagagcagcagaacgtcaagaagggacccagggtgatttatgatgagaagaaaggcaccgtgtacagctactcctatttccacttcgtcttcttcctggcttccctctacgtgatgatgactctgaccagctggttccactatgaaaatgccaccattaagaccttcttctcaggctggtccgtcttctgggtcaagatggcctcctgctggatgtgtgtgctgctgtacctgcagaccttggtggcccctctctgctgtccctccaggcagttctctgtgtgaggatgtccaggtgccctgtggctcagcaggcctgtgcccactgtggagggctgccctttgaacgtgtgcaccaggggtttaagcagcaactggtgccctgtgaaaagctgacatcccctggctagcttaagtaggtctgacaaagctttcaggaaacaaacaaaatctcctgattagcttctagttgtaaaatccaaaaggaaactaccagttagatcgacaggaattgaaatctttagccaagctggtaggtgcaattatctctttatgccttacccaagaattagctgaagttttgttgctgttcttcctggacgtgttttaaccaggccagagcttggggcacagcgtctgtcacagggatgaaaatgtccttgtatggcctgtcactctcatccttggcataaagaagcaacaacaaaaacacttgagtcctcagcctaaggtggggcttggcccctgtcactcacctttgcctgcctcccagagccctcacagttccctgtttatgcagagtacagagggagcccctcctttgactccaccctcaactacttctgcacatccctgccccagcattttctgttgaggtcatgatgctgggagtcatggccttcttgtcctctctgcccttggcagaggtccttcattcttgtctaaggtagtgtttgtaataatgtgaaaagcacaatttcttctcaccttcatgggatgctccaccatgttttccctacccagtacaagacactgcagtaatcctgctcttatttatggcagtgttcatgtgactgtaaaacaagatgcatgttgttgtctttgcccaagtagtggagggttgcagttcttacttgtgagtgtcattaacagtaatgctttaagggtcttaacaaaaacgttgcttctttactgcagcttgccacacccctctcagtgttaaggtcagcccccctgactcacccccaccatgaggccttcctcacttacagtgtgcccccaatgctaacagcatggtttccttgaagtagaggagggctggggtaaggttcccaagcagcttccaacagagctggccacacagatcggccagacaagctgtgcaagtgtggaattaggctgagatgcaaaagtcggtggttggaggcatctcacaagactacgattacatccatacaaattcctagatatgcttttggaaagcagtgctcacaagtgtgcattttagtgccaatgttcatagtgagggagaggatttccccagtgcctatctgaacaaatcagacagaattgggacccacataagcctgattcccacaagccaaaatgtcagaatcttcatttctactcactactgtaccctcctgctaaaaggacccacggaaagaaatagtggtgaattcagtggagagcttgtctggtttatagtatttgagatcctgtcttaaaaggtacacacataaggacaccttgtctgtaaactctcagcagttcaaagagaggagaatcacacaaagcatagctgtatactagctctaaacaagtctagttaatccagtaggaatgggagcctcatcatctggggcctgtgtaaggcagcagcttcgttgcagcagcccctgctgtgctgaagaaaggaggtgctgagagagaggcagagaggaactctgctggggggagcaggattgttttgccaaggtttgtctctgctgagactggaagccaggcgtggtgacttttgaactggtcacagccaggctgacgaggccacacatacctgggctagcctttgttggccccttttcctctatggaaagcagctcagggaaacccagacagtaccagtggctgccccggtggcttccctctgaaccaagccccattcactttctagctgcctaagtcttggttgagtacatgccctgccgttcttcagaagttaggcctcacacaggacgaagagctggccaccctcttctttactctcagctaatggtataaatggatggtcagaattgagatgaagggtttctaagagagatatacataagaattgatcctttaatctctgctgaagtgagggagtctctggtttctagggcagctagaccctatttcaaaacaaaaagttggcatttgtgatcagctgtgagaaactactcaggtagaagcctgtttgtgagcttaggaatactattgtttgtgaaactggagaaaactggaaagtgtgccattgttttgagataacaacagcaatgttaccttgcttttaaagataacaggcctttgcttcgtgcaatacccaagcaacactatcaaaattcatgctttgaagctgcccatctgaccttagccatggcagccctggaggcagagtttagaaatcatgtgttctctccctctagtgttttatgagtaaaatgttagttatgccatggagggattctcctgggagtctcattcacacatgatgcctgcttcaagtttttgtggtgctggatagctgatctgggtttcttgggaagtcagcagatgaattgttctgcaggggtttggggaagttttatggagtgggtggactgtggtatggaaagagttgtggggggagacatggagtattgagacttctggttccgaatcccatagggagtggccagtgggagacatagtgccatgtctccagttccacggtgacttcacgccagtgttaattgcccccttcccaaattgtcaccctctgtctttatccaataatgttctcatgccgtccttggtgcttcacgttaccctggaaagagagctccagagcttgcatttaaacttctgggcatctctgcttcaatgcctttctaaccagtggctctttttcgtgtgcggaaacataaaccagtgcacatcccacatactgccaagaagtgaaagggcttcataaggaagatgggcaccagggaggaccctgggcttcctcctcggacatgagcttgccacctggtcatatgctctgaaggtttcttctgtgactgagactagtaaacattttattccctgcagagatgagctgtctggcatgggggtgacttcagtagacaggagagccgacatgatggctttagctcgttctcacttgccgttttccatcactgaggcattcacagagacagttactttaaaaggctgaaacacttggcttttaccaaagaggtgtatctgattttgttttagttgggcaagggcagaactggaatgcatttgcccaattgacttcaagaagtttaactacattcatgtgaggaaaatgatagaagtctttaaggtaattctttaggatcctgggaaattctctcaggtaaagaaagattacagcagatgagtaatatatgtcttgagagctatttataaaaattgtaagaggatcattttgtttccatttattaaaaagttaaacttttttactttgcaaagaaaatactacaaacatttttatagtcataactgttaatttttttaaaaagacttttttttttggaaacaattagctgtagccaaattttgtggttacatttttgctatagtggagtttgaatgcaatctgtgtggtaagtctactgtttgtttataaaggtctctgacatggttagattttgctaccttttaaaatagttatttttccccattagccacaaagccaattatggatttgtatttgtgtttttcaatgctaatttttctatgaagcacctgaaattgactagccttttcctatgtagaaaactcaaacatgttaactctgtactttaataaaatgtaaacttgaaatcatg

SEQ ID NO: 1712 - protein, 452 aa, Mus musculus
LACCCGSAGCSLCCGCCPKFRQSRTTRFMYLFYFILVIALCCVMMTPSVMKQVKDHIPFFEEFCKKTQAGGDACENLVGYSAVYRVCFGMACFFALFCLLTLKVNNSKSCRAYIHNGFWFFKLLLLGAMCSGAFFIPDQETFLKVWRYVGAGGSFLFICIQLLLIVQFAHKWNKNWTAGTVRNKLWYASLSLVTLIMYSVAVGGLALMAVFYTQWDDCMDNKILLGVHGGLCVLISLVAISPCVQNRQPHSGLLQSGLISCYVTYLTFSALTSKPEKKVLDEHGKNVTICAPDFGQDLHRDENMVTWLGTLLLIVCISYSCLTSTTRSSSDALQSRYGAPELEVARCCFCFGPDGEDTEEQQNVKKGPRVIYDEKKGTVYSYSYFHFVFFLASLYVMMTLTSWFHYENATIKTFFSGWSVFWVKMASCWMCVLLYLQTLVAPLCCPSRQFSV

SEQ ID NO: 1713 - DNA, 133300 bp, Homo sapiens
  misc_feature (1)...(133300): n = a, g ,c or t
gccacagcagcagaagaaggtggcaaaggggagtcccaggatgaaagtgcagcagcaacctggaggaatccagactgcagtagtgcagaggtctctgggaccaagacagggcccttggggaaagtggaatgacagactgtctgacatggatgatcatctgggaaaaaaggattttgacaggcctggcactgtggctcacacctgtaatcccaggactttgggagggccaggtgagaggatcacttgaggctaggagttcaagaccagcctggtcaaaaattacaaaatttagccatctgtagtcctagaggctcagcaggctgaggcaggaagatcgctcgagcccaggagtttgaggctgcagtgagccaaaattgtgccattgcacttcagcctaggtaggtgacagagagaaaccccatctcaaaagaagaaaaaaaaaaaagattatgacaggccagtcatggtggctcacgcctgtaatcccagcactttgggaggctgaggcggggggaagccagcactcgctgaggccagaagtttgagaccagcatggtaaaaccccgtctctactaaaaagacaaaaattagctgggcatagtggtgggtgcctgtagtcccagctactcaggaggctgcggcagagcttgcagtgagctaagatcgcaccactgcactccagcctgggagacagagtgagagtccatctccaaaaaaaaaaaaaaaagattgtgacagatcagatggacaagtggagaagaagcaagaacaagtacatagaaaaccattcaagtaatatataacccaagaacttaacgcatgctatgtgttattgtacttcactgtgtataaatgtatgaactctccttattttacagaggatgaaactgaggtacagagaaattaagtcacttcctcaagattacagacctaacaaatggtaaagaacaaatttcattccagggtccagctccaggggttctaaccctaaccattagaatatactgcctctaacaggagggatgaaattggaaaataaaagtagacaaaaaacgctaatattatatactatgtggctatgtaatgcataattttgactagacatgattacatgttggccgataaattttatgaaaaccgtgatgtaattagattggcaagggggcaggtgaaagtgggttgagaattcagcctaaatggaacataaaagaaactgcaaaataaatgctgcccacacatcaggaaataacagcagaagaacattatttgaaaatatgaggctgggcacagtggctcatgcctgtaatcccagcactttggaaggctgaggcgggcagatcacctgaggtctggagttcgagaccagcctggccaacatggtgaaaccccatctctactgaaaaaaagaaaaaagggaaggggaaggggaaggggaaggggaaggggatattggctaggcacggtggctcatgcctgtaatcccagcagtttgaaaccctgaggcgggtgaatcacttgaggtcaggagttttgagaccagcctggccaacatgatgaaatcctgtctctactaaaactacaaaaatattagatgggcctgggtgcagtggctcacgcctataaccccagcactttgggaggctgaggtgaatggatcatgaggtcaggagttcaagaccagcctggccaagatgatgaaaccctgtctctactaaaaatacaaaaaaattagccaggcatggtggcgggtgcctgtaatcccagctactcaggaggctgaggcagagaattgcttgaactcgggaggtggaggttgcggtgagctgagatcgcaccactgcactctagcctgggcgacagagcaagactacatctcaaaaacaaaaaacaaaaaactaaaaggccaggcgcagtggctcacacctgtaatcccagcactttgggaggccaaggtgggcagatcacgaggtcagaagatcgagaccatcctggccaacatggtgaaaccccatctctactaaaaatacaaaaaattagctgagcgtggtggcgtgtacctgtaatcccagcgattcgggaggctgagatgggagaatcacttgaaccagggagtcagaggttgcagtgagccaagacagtgccactgcactccagcctggaaagtgagcaagactccgtctaaaaaaaaaaaaaaaaattagctgggcatggtggcacatgcctgtaatcccagctactcaggagtctgaggcaggagaatcacctgaacctgggaggcggaggttgcagtaagccgagattgtgccattgtactccagcctgagtgacagagtgagactcaatctcaaaaaatatatatatgtatatatttatatatatgtatatatttatatatatatatatacacacatatatatatatggaggtgaataggggaaaactgtataaatgactgaaagtggttgcctctggggtaggaactagaaggtaaggaatggagactggagaggatatttttcattttattttttgtaatatttggacccattttatgtcattgtcaatttgtaaacttttgacactaaaaatttttactctaaaaattaaaaaaattgccaggcgtggtggctgacacctgtaatcccagcactttgggaggctgaggtgggtggatcatctgaggtcaggagttcgagaccaacctgaccaacatggtgaaaccgcgtctctaccaaaaatacaaaaattagccaggtgtggtggtgggcgcctgtaattccagctactcgggaggctaagacatgagaatagcttgaacccaggagttggaggttgcagtgagccgagattgcgccattgtattccagcctgggcaacagagcgagactccgtcacacacacaaaaaaagggccaggcacggtgatggtgatccacacctgtaattctagtagtttgggaggccgaggcaggtggatcacgaggtcaggagttcgagaccagcctgaccaacatggtgaaaccccatctctacttaaaaaaaaaaaaaattaaaaaacattttgcatatgctgggtgcagtggctcacgcctgtaatctccgcattttgggaggccaaggcaggtggattgcttggcctcaggagttcaagaccagcatgggcaacatggtgaaacccagtctttacaaaaaatacaaaaattagccaggctgtgatggtgcatacctgtagtcccagctactcaggaggctgaggtgggaggatcacttgagcctgggaggtgaaggttatagtgagccgtaatggcatcattgcactccagccttccagcctgggcaacagagagagagaccctgtcgccaaaaaacaaaacaaaacaaaacaaaacaaacaaaaacctgtgcatatattaatttaatagaaataaatgacaatatagctatcagagaaatggggtgaaggcactatagggctctgattactttttgcctggggcttgcaaatttatagctatttgtttctaaatgaatactttgttgtttacttttaattgaaattaattaaacttcgtccactggattgaggttcctagagacctcataagtgaaaattaaagaaatttctccttttatagttaaaaaccaacagaatgcttcactaggttttttttcaaagttgttcatgttttaaataattagaataattggaaattaaatttgtaataaagttgcgatcttggctcactacaacctccgcctcccaggttcaagcgattctcctgcctcaacctcctgagtagctgggattataggtgcctgccaccacatccggctaatttttgtatttttagtagagatggggtttcaccatgttggccaggctggtctccaactcctgacttcagatgatccacgcacctgagctttcccaaaatgttgggattacaggcgtgagccaccacgcccagccagtgtgtggtgtttttaaactcaacattgaactctaccaaaaaaatcttcaaattcaggaggagaaaaaagcaaattataagctagatatttatgttatatatacttatatataattatgttgtataaaaggagctaattcagttaatttaagaaaatttttgtgggggaaatatttcacatggtctgccaagagctatacagtcttattaaaacaggtctgttactgctggttactgaaaaagtcacatcaaaagagcttgactgtaaaattatctacgtgttatgaacatcaagtctcccctgaaaaagtctgcagagtacttaaaataaaaattaaggtgccactgtttcgtgttatgtctgctaacattacctctactcttgtttttttttttttttttttttttttgagacggagtctcgctaggtcgcccaggccggagtgcagtggcgcgatctcggctcactgcaagctccgcctcccgggttcacgccattctcctgcctcagcctcccgagtagctgggactacaggcacccgccaccaggcccggctaattttttatatttttagtagagatggggtttcaccatgttagccaggatggtctcgatctcctgacctcgtgatccgcccgcctcggcctcccaaagtgctgggattacaggcgtgagccactctgcccagcctactcttgttaaccaaccacgatgcaaaggaagctattaaccagaccttaaatagtaactgcaaagtcctcagagccagaaggcaggtaaacctccagatctggccacattcctttgaaaaaactctgagtggggaaagggaatgagcctgtatagactgtttctttttaattttctttttcttttcaagatggagcctcattctgtcgcctaggctggagtgtagtggtgttttctcggcttactgcaacctccacctcctgggttcaagtgattcttgtgcctcagcctcctgaggagctgggattaaagatgtgccgcgacgctcggctaatttttgtatttttagtagagaagaggtttcaccatattggccaggctggtctcgaactcccaacctcaggtgatttacccacctcggcctcctaaaatgctgggattataggcatgagccactgtgcccggcctcttttttttaatggacagatcctgcctcatgtttgtttgtataaatagaaaagaatggtaccagctccatgcagaaacagatggcagcccagggctcacaccagtccttctgtcctcccattggtagacagaggcctctcctccagatcctttgtgggtgtgcatgggcacccttggaaatttgatctggagctggaactggaactggaactggagctggaactggaactggaactggagctgcaactgaagtctgggctttggttggagccttggccttggactttggccggcaaaaccagccttggccaggtgggttcaagcatgcttcctaagcttggggtggatgattcaggcaagttgattgaattttcagctgatgtcttttggtatcttgagcttgaccatgtaggggtgaagggcaaacttcccctttaccctctgaagtttcactgaaaatcaaccgacaaggcagattaaaaggaaaaaaggcatacaaatttatttgatcatagttttacatgccatgggagccttcagaatgaagacccaaagatacagcaaaattgtccattcttatgcttacattcaacagagtatggacagccatgtagaaatgtgactggacaaaaagtatattgttaccagagtggggtcctcatccagtccacaagagagggttcttgaacctcacgcaagaaagaatttggggcaagtccataaagtgaaatcaaatttattagagaagtaaaggaggtaaagaatggctactccataggcagagctgcagcatgggctgctcaactaattatagttatttcttgattatatgctaaacaaggggtggattattcatgagttttccgcgaaagggatgggcaattcccagaactgagggttcctcctcctttagaccatatagggtaacttcctgatgtttgtaaactgtcctggtgctggtgggagtgtcttttagcatgctaatgaattataattagtgtataatgagcagtgggcacgaccagagctcactttggtcgccatcttgattttgatgggttttggccggctcctttactacatcctattttaccagcaaggtctttgtgacctgtatcttgtgctgacccccaccatctcatcctcgaagaatgccttaacttcctgggaatacagcccagcaggtcacagccttattttacccagtccctattcaagatggagtctctctggttcaaatgcctctgacactattaacctggttttgaagatgaggaaactgaggcttggaggtcacccagctacttcttggtagagttagaatttgcaacttcctggcttgaaaactcaggctttatccttttctggtacctttcaatagaggctacaagtccccaggttatttatttatttatctattgagatagaattttgctcttgttgcccaggctggggtgcaatggcaccatctaggctaactgcaacctccgcctcctgggttcaagtgattctcctgcctcagcctcctgagtagctgaaattacaggtgcccaccaccctgcctggctaatttttgtatttttagtagagacagggtttcgccatgttggccaggctggtcttgaactcctaaccacaggtgatccacccacctttgcctctgaaaatgctgggatgacaggtgtgagccaccgtgcctggccaagtgcccaggttattaagactctttctccaggtggcagacatccacattctcagagtcctctcacattggcatggaactagcaatgtaggggagggaaaaatggcttccctctacccttctaggttctttacttggattgcaaattaaattgacataacagagatttttttttttttttttgagacggtatcttgctctgtcgcccaggctggagtgctgtggcacaatctcggctaactgcaacttccgcctcctgggttcaagcgattctcctgcctcagcttctgagtaactgggattacaggtgcgcaccacctcgcccggctacttcttttgtatttttagtagagatggggttgcaccatgttggtcaggctggtctcaaactcctgacctcgtgatccgcccacctcggcctcccaaagtgctgggattacaggcatgagccaccacgcctggccgacataagacagattaacagaagaaaaaccgttttaattacctgcatacgcagcagcacaggaatctcacaaaacatgaagggccagatgattgaagcttatagcattctgagctagaaataaataagggcttggggcttctgtggggacagtggggaggcaccacaggtaggatataggagggttagtggaggaaatgtatggtaaataatgttgccttgtggctgcgcgcggtggctcacacctgtaatcccagcactttgggaggccgaggtgggcggatcacgaggtcaggagttcgagaccagcctgaccaacatggtgaaaccccgtctctactaaaaatacaaaaattacccgggcgcggtggcgcgcgcctgtaatcccggctacttcagaggctgaggccggagaatcgcttgaacccggggggcggaggttgcagtgagccgggatcatgccaatgcactccagcctgggcgactgagcgagactctgcctcaaaaaaaaaaaaaaaaaaaaaaaaaaaagttgccttgttatgtaaagtctctcatgtaataaaagttctctgagcagctgccttcctgacacagatacttttactatgtggacttcctttatagatgtaaatttgctttacaaaaggacagcttttcagagctactcccgtgtctgcagtttctcagaataaccagcttgaaatgtgccaaacaagtgtattttgggatagcatattttggtattctacagtcataatttggggtgctgtggcctgagcctcagcagcaaaaagaggacatgattcagggttcggagcgctggattctattaccagctctgccccctaacccagtggtctcttgtgaaaggtcctcgagttccgagtcgagtcaatttccctaaaaggcaaagaggcatcggagttccagctggcttaaacatttgtagatttcgcgccttcccttttcgcccctccttcctctccacccgtctccccaccccgagctactagggggcctgcccatttccccaggccaggagtagggctgaagtgaagtgaccgcggtcgtagccaacagcgaagctcattagaaagtcctggtgagagcctcagcttctgatgagtcacagatcgccacggagcaggttgctgcgcttgactgattgggtttaccctatttttgttttgagttagagccaactgtcctcattccttttcgtggctctgagtagggcctgctccattatatctctttctctaaacgcctgcatctgagatgctggaaaatcctgcgcagctcataacccaaggcctggtttccattcacctttcctcttctactcctaagctgcccaagacactcctttgccagagctctgtctggaaacgagtccctctaaggtcaagccttgcgtcatgtgccaggggatcagacgagtggattccaggcccagttttacttcctcaactttgctgtgaggctttgggcaagttatttaacctctctgggcttcagttgcctcaccgctaaaatgggtacggtaatgcttatttgaaagagcaaagggattggcgcaaaaatcgcactaacagaaatatcttcattccggcagggcgcggtggctcacgcctgtaatcccagcactttgggaggccgaggcgggcggatcacctgaggtcaggagttcgagaccagcctggccaagatggtgaaaccccgtctctactaaaaatacaaaaaattagccgggcgtggtggcaggcgcctgtaatcccagctactcgggaggcagaggttgcagtgagccgagatcgcgtcactgcactccagcctgggcgacagagtgaagctccgtctcagagaaaaaaaagaaaaaaaaaaaagaaataccttcattcctcttggggaggtggctgtgaggacagcagatctgagtgggagaaaacctagagacggcctccctgccttctgtatggaacaagcaattattgggcaccctctttttagtgaggaagcagggacggaaaatgagtccttgggccagcgcaggaggagaggctggaaaacatatcaatattcaggaaggcacggaaagggctctcaatggatctctcaccaagtgccatcagggcagaacagtcaagggcccagggattcgaggaagcttgggaggcgcggagagcccaaaagttgaaagttttcttggcagatgagggaaggaaagggatttcaggaacaaggatctcgtgggtgggctgtcccagtcggcgcgcggcagagcgcagaccagcacccggcggtctggtctgtgcaggaaaggcaggaaccgcttactaaggctccaaccttttagaggcagcaacaagctctttctctggatccgaaggcggagaggcgctgcgctctcatttggcgagggcccgagcgcggccagaccgcgcaccagacccggagcgtggggcccaaaggctggcggccgactccggagctcggcgccccaaccgggaagtgatcgcagcagcccacccgcctgacgccagcggaagtgcgagcccgggtcgagcctgctccgccgccgggcgcccgggaaggggcgggcacggggcggggctgggggcgggcgaggcggggccggcggcggggcggggcttggccgcagttgtttttacccaggcctcggcgcctaggcgctccgccgaggctgatcttcgttcaagtgtgagctgcggctgagcccagcgctcgaggcgcgaggcagccaggagggcccgtgcggcgcggggagccagcgagcgcgccttcggcattggccgccgcgatgtcagctcagtgctgtgcgggccaggtgagcgaggccgggcgcagcgcgggggttgtcagatcggagaaccgggccaggagtccaggcgtggaggacctgcctgggtgcgctcccagctccgcggccgaacgtagggcccgggtgggtcgctcgggctggccccgcggcgctcagccgtccgggaaatcctgtgccctgggcgggcgggaaggggcagggggaagcccgagaggctaccccggggtcttcccgtccggcctccgggactccgcgtggagcggggcgtgccgggctcgggcggaggatcccgactgctccaggggcgtgtcgcctcttgcgccgagcactggtgaatagcgctgagctccgtagccctctccactctgcttgtcggatgaatccaggaagaaaagtgggtttaggcaccgtctcctttgctatgccctgaataaaactcgggtcaaacaacccaggcaggttgcgcttggcatctcgtagtcgagcgtgggctctgtacctttgagaatgtctcgaagcctgacttccaaactaccgggcgcaggtctgggcgaagggaaaactcagccctgcttcctgaatttcccgacccaaccctggctcggtactagcacgactgcctgggtagggctggaaccttcctgcctctctttgcaaataaacttgttcgaacctgttttttaactctcgcctatttaaacctatgatgtcttaaaacattatgtctcctaccagttactgcatcagtgtagaattagtacgtcttagccctgtaatgctggtttcactccttcctgcagagttagaaaaaacgaagtaggtgagtctcttggatgtggagctcttttctccctttacatgtggattatcagcgtttcggtacagagttttaatggagtgttttcacgaacgaatcagactctagggagcatcctggttcggggtgttcttgctgacactcagcctttccacaatcgaggccagctgtaagtgatggagtggttaaactgtgggtttctgtaaccggcgattatactggcagataatctgtcctgtttagagtggccacgtggagctgtcttggtttttgaggtctaatactgtgcttggcatacattaaagctggccttttcagagttgaggaaattgaggcttttgacgactgagacgaaatgattttttttccctgtgtcaggcagagagagaaagagaatgagaatggtcaccaccttaccaggtatttgagaacaaggtggaccaggaaagactgttttcagaaagctctgcaaatcttttattcccgttttgaaatactttttctccaatatgatgcgacactttttattacgtagtaatgatacagctctttaggggcatctgtcctggtcccttgaagtccccttgaggctctttctgccattcccaagttcctaatttagagctctgtaattaccagtattcaaatgggttttgtaaaagaattattttgctgttgatgttttagcaggtttctaaagtctcccctcttaggactttggaaagaaccaaatcaaagttaacccctgctttcccaggcctgctggaggcatcactgtggtgggcctcagtgctgtgtgatggtgatcacactgtgatttcctgtggatggggcggtaggaagttaaaagaaaagcaaacaggctgggcgcagtggctcatgcctgtaatcccagcactttgggaggcagaggcgggcggatcacctgagatcaggagttggagaccagcctgaccaacgtggagaaacctcatctctactaaaaacacaaaattgccgggtgtgatgacgcatgcctgtaatcccagctacacagctaaggcaggagaatcgcttgaacccagaggcagaggttgtggtgagctgagatcacgccattgcactcaagcctgggcaatgagcaaaaagagcaaaactccatctcaaaagaaaggaaagcaaacaaaacctcacagcaccgtcagaagttaccaattcttgtttgtttctgtgggcacctgccttttgccaggagcctgctatatagtcataagtcagacaagcatctctgctctcaatggcctatctgggcaggggagatcattcataaacatgtaaacaatgaaacaatgaatatggtactggtactgtcagaaggccgtgtggtaagcagccttgaggagggttgccgagggagtctgagaagatgcctgtggagttgagactgctcagtgaggagaggcaagggagtctagggtggctggggtgtcttagatgaggtcagagagaagagcaggaccagaaatggccagaacctgtcagctgcctttggactttggatttaattctggttgcagtgagaggctgtgggaggattctgagcaggggcgagctgtggtttgatttgcacttagaagataattgggatgtcgtgaagactggactgtaacgggctagagtggaggtgaggaaagcagttcgagttggtcatgaagcagttggtgaggaaaacctaagtggatatttgcctcttaggggcaagcagtgttctaggcttcggcagtgaacaaaaatcctttcctgatggagctcgaatcctggcaatctgctgttgctgtagtcccaggaggagacagcgtggtaccttaatttaggctatggctgtaggagtgagtacagtgggacatcattggctttgggtatatttcagaggtagaactggatttgagcaaggattagaagtgggatgtgggaatgagacaggctcggtttctggcctgagccactgggtagatgatgatcgcattactgaggtgaagtaggaaattgttaggaagaggacatttggtgaggaaaacccaagtttcttggcttcgttacattagagatgcctattataaatttaatggaaatggcaagtcaccaattaggtatttaggtcgggagaagtttgaggtcggagagagacattttggtgactttctttaactgcggaccatcctgaacaatatgtaacccataaaagagcctgggctttggactcaggcctgggtttcaatttggaaatctggacaatgaggactggtgtgactggatgagttacttaccctctatgacctcattttacctcaactattgaatgggtacttcttagggttattgggaaaattacatgtgatgataagtgtaaagtctgtaatataggatttggcagagtgtgaggaaccccccaaatcttattagtggccattacccatctgcatcaggataatatccagatcagcttattttatttttgtatctactctgatattcactttggttttgcttaggctgttggctaatggatgctaagaaagtagagattacaggggagtggtcactcaacactttatgggttcaaagttctgtgctaggcccctagagacacggtaatgaacacagggcttccttgttctcctttaacttaagggctatgtggaggtgggagtgttgggggaagttagctacagaaaatgacagtgcaggctgggcatggtggctcttgcctgtaatcccagcactttgggaggccgaggcaggtggatcgcttgaggccaggagttcgagaccagcctgggcaacatggtgaaaccctgtctctactaaaacaaaaattagccaggcgtgatggtgcacgacctgtattcccagctacttgggaggctgaggcaccagaatcacttgaacttggaaggtgcaggttgcagtgagctgatattgagcactgcaccctagcctgagcaacagagtgagacgctgtctcaaaaaaaaaaaaaaaaaaaaaaggaaaagaaaagaaaatgacagtgctcactgtcagagcggaagtgaggtgtgtgcttggaaaatctagacaacctttccaaggcagtttgacaatagggattgggagggcttgctgcaggcaagtataggcatttatgacaataataatgctgaaatttatttcagcccacagtatgtgctttgtttttacatacattataattcattcattcctcacaaaacccctgcttggcctccttttacagatgagtcaactaaagtatagagaaataaatgaactgatgttaccaactgactgatggtagagccaggccttgcatactggcccacctgacttgagttgggtgacttttgtaccagactgctattccttattattcctatgtgaataaataatataattgctccagatggacccagtgcagttttgaataccctgctattggctgttttcgtagttattgttggctgccagtagttaatggttgggtgaggcttaacttctccctcatacctaattcaggtcataaagaccaaagtcacagaccaaattctgtcacacatacagacagtggcaggcgtatggaatagtcatgcagcctgttctgagacttcctgacattccagctctttgaccttgttggtgctctgataggcttcttgcctgaaaagttcacccgaggcagatgcgccaacattctagtaggcaagactcagctaatgtctggttggtgggcagccaagactattgcaccaggaggatcaagcccgtggttgccattctgagtaaaggttcactctgtctttttttttttttttttgagacagcgtctcattctgtcacccaggctggagtgcagtggcgcaatcttggctccctgcaacctccgcctcccgggtccaagcgattctcctgcttcagcctcctgaatagctgggattacaggcacttgccactacatctggctaatttttgcattttcagtagagatggggttttgtcatcttggccaggctggtctcgaactcctgacctcaggtgacccgcccgcctctgcctcccaaagtgctgggattacaggcatgagctactgcgccggccctattcactctatctttatagccagtttatgcaaggcaggaatgcccaggcccaggtatttccagccagatcctatttctagatcaccaagattttcctcaatgaaaacccatgtatgtatgtatgtatgtatgtatgtatgtatgtatgcatgtatgtatttaaagatgggatctagctcttgcccaggctggattgcagtggctcaatcatagctcactgcagcctccaactcctggggtcaagcaatctttctgcttcagcctcccaagtagctgggactacaggtgcgttctaccatgcctggccagtttttaaaaatttttgtagagactgggtctggctttgctgcccaggctagtaaaactcatttctgatgtccgttatgttaattaacaaagccttgaatgccaccaggaactatccatcatcaaagataaacaaagcgggacattagttaaagcagtaaaaacacgtttattcagtaactattgactgtaggggaaagagctgagctccattcgattttgtgcagaggtgactaggccttttaaagtgagcataagggagtaaggaggggagtgagcggtggctcaagagtcaggaaagtgaaaagttacaaagggttggtcgctgtaaatgcaattaggccagctgtgtggcctttgattaaatgtttgctggaataggggtcttatcagggcaactgatgcccctataatgcagcttaaaacacacacccacatacacagagtccatgaagaagacttatttaaaaaataaattacacaccacatacaataatgatgattccaggccgggcatggtggctcacgcctataatcccagcactttgggaggctcaggtgggcggagttcgagaccagcctggccaacatggcgaaaccctgtctctactaaaaatataaaaattaactgggcgtgatggcatatgcctgtaatcccagctactcaggaggctgaggcaggagagtcgcttgaacctgggaggctgaagttgctgtgagccaagatcatggcacttcactccagcttgggcaagacagcgagactccgtttcaaaaaataataataatgatgatgtttcccccaaaatgtccttccttcttcactgtaaaacccaaatctctactttgaggtcccagctcaattaatgtttcctcagtaatgatctttctcttgttttgagagtcctcacagaatttctgcttcgtggacttgattgcaccacttagtactgggtcatctgatgcattggaattaaatcctggctactgcaaggatgtttcctctcttcttataagcagagcacttattgtgacctagctgaaccccctgttgagctcttttggttacagaactcttgttccctattgctctttgtttatagtgattggaaatgttaggtcctcattatattacatggtgcttccactggaagggatccaattacaaaaattcattatttccatgatgatacttttttgaacaatgtgggaagtatttgtgaaacagagggaaatcacacatatcattacccagagagaaccacattttgatgctttatagtcagttacttatatttaatatttattattttatttttttttatttttgagacagagttttcgctcttgttgccgaggctggagtgcaatggcgtgatcttggctcactgcaacctccgcctcccaggttcaagcagttctcctgcctcagtctcctgagtagctgggattacaggtgcccgccaccacgcccagctaattttgtgtttttagtagagatggggtttccccatgttggctaggctggtcttgaactcctgatctcaggtgatctgcccgcctcagcctcccaaagtgctggtattacaggactgagccactgtgcccggccgatatttataattttactttgcaaagttgggattttgttggaagtgctgtatttgatcccactctttttgcataattatgaggtgactgataaagttttttttaacatgcacccaccacttattgtagctgttaatgttttctgggtttacattcatatgtagatagtcttctaccttcaaacttgatggtttctttttttttttggagacagagtctcgctgtgttgcccaggctggagtgcagtggtgcgatctcggctcactgcaagctccgcctcccaggttcacaccattctcccgcctcagcctcccgagtagctgggactacaggcacccatcaccacgcccggctaatttttttgtatttttagtagagacggggtttcaccatgttagtcaggatggtctcgatctcctgacctcgtgatccacccgccttggcctcccaaagtgctgggattacaggcgtgagccaccgtacccggcctgatggtttcttcagaggtgttaatgttgaatgtgtgaaagtcacttaatgagcttttgcattaagaggtttgggtgtgtttctattcccaaaaggacaaaagtaatgaaaaaaaatccctaatttcatctctgttagatggcatcattgacaatatatttctgtcattttcaacattttctttaactttgaccttttctttttacaattactttcacagataacgtctgtccaaatggtggttgagtcactgttttcctgctgtatgatggtggccatctttgcttccactgcattaacattgaggcctgtgtttcttatcactagcactggcacttttattttcctgttcatctttataaagatgtgggcacaatgcagtaaagtgccctataattgttctgtcaaggtggtgttttggttgatgttggctaaatacggtagtacccctttacttgcagttttgctttctgtggtttcagttacctgaggtctattggggtatgaaaatattaagtggaaaattccagaaataaacaattcacaggtttaaattatgccctgttctgaatagtgtgatgaaacctcactccatcccaccgggatgtgaatcaattctggccagcatctccatgctgtctagctgtctacctatgctcctcaccccttagtcacttaggagccatctcggttatcagatccactgtcgcagaattgcagtctttgtgttcaagtcgttcaagtcacctatatttgacttagtggccccaaagcgcaagagtagtgatgttggcatagtgtcataagagtttgattttattatttcttattgttgttaatctcttaactgtgcctaatttagaaattaaacttcatcatgaggccaggcaaggtggctcatgcctgtaatcccagcactttcagaggctgaggtgggtggatcacttgagcccaggagttagagaccagcctgggcaacatggagaaaccctgtctctacaaaaaacaaaaattagccagggcatggtggtgtgtgtgcctatatagtcccagctacttgggaggctgaggtgggaggatcacctgagcccagggaggtcgaggctgcagtgagccatggttgtgtcactgcactccagcctgggtgacagagtgagaccctgtcttaaacaacaaaactttctcataggtatgtatatacaggaaaaaacacagtatatatggggttgggtactatccacactttcaggcatccactggggatcttggaacacatcctccttgggtaaggagggactactctgtatagctcactggtgagctgatacaggaagggtggcttaggagtgtctttgtgtagtgtagctaaattcaggttgtcaggtaatcctctgtcacttaccttgaacagtatggagagtgaaggttgcactcttagttggagagttgcttgatggttgctcattcaaatatgttttcttgggcagctctgtagctgacctgtccagctgacaaatagctttggactgcagcaagtctgactttgtaggcacggttgaggagaggccagtctgtaggcgtggaaggcagcctctgactcatctctctgtgctaattaaataaaaggtaacacccccttccccattgcttgctttccgccctcgttttctgtatagaggctgtagatttcccacagatactgagtatctgggagtgactatgagacacggaagctttactttccagttttccaggtattttaatgtagtcaccagttagagcctcagaaagggcactgcagtaattatggcattgtctacttttatttcagagcagtatgtggccagatcatctgtgataacttgatgttaaaaaggaagtcttcatataagctgatatgtctacagaactagccattggatgtaattctttgaccaagctatttttagtactttaagtggccatacctgcctaattgtaaagacccagtgttttcttagtgttctgagtcaagccgcattgttggtgaattttacatattgctgtttgcagttgaatttagggttatgattggatcctgagaacagtatcaatcaagttacctctctaaatcactgtgattgttcccaaatattaggcatcccaagtagcccagagtaaacctttgctgccctgcttaaaatgtattttaaaacatttacagtgagaatatccccatattcttctagcttatatattaatgatatttcaaaacattttagaacttaatctgagagtcagtatagggcagtaggaaattcaaatactgagttggtgtgattacacagaacatctgtttgaattttaaagggaagcaggattttacttttggcttttcttccgtagtttgccttgtgagattaaaattgctgatgtttaaggaaagcagctgttgtggaaagacttagtgggtttttatcagagagtaaattttgaaacaatttgtgggtttttgaagtaaggttacagtatatagtgattagacagcattttcactctctcatgaaaactgtgtagtcaaaacaaaagtaggaaaaacacatgcataaccccttaaatcttatttatgaaaagataactagcgaagatgggaaaatcagacttgtgtttaagtatcatttttttataaactagctaagtgcattttgaaacaaaattcatgaggtctttgtggaatgccttttccatttttttgttttgttttgttttgtttttgcactcacattatgtctcagcaatttaatggagggctgatttcctaatgctttgatccttggtgagtgtggttcaccccaactagggaggaattcagtcttttgttcttgattccatgctcattgatctcctccactgccattctcagaaacaatggcagtattttgtttccatagtaatgaaactgtttgctctaataggattctatagtggtaatttttctttagctttgctagccttatccctaaggactctaggactttgttggacttattttgttagctgttactcttttttttttttttttttttttaaagagctgacaatccctaaagtaaaatgtcaattgataaatattctctggggccaggtgtggtggctcacacctgtaatcccagcattttttggggctgaggcgggtggatcacctgaggtcaggagttggacaccagcctggccaacatggtgaagccccgtctctactaaaaatacaaaaattagccaggcatgatagcacatgcctgtaatcccagatactcaggaggctgaggcacgagaattgcatgaacatgggaggctgaggttgtagtgagctgagatcatgccattgcactccagcctgggcaacagagtgagactcagtctcaaaaaataaaaaataaaaaaaaataaatattcactgggtgcctagaataatgaagttcagaggctgtatgtagctagccctgcttgtgcttgggagtgacttgtgaatagatgctgaatttgctagcctatgagactgtgcctgggccagtgcttcttcacagactggattgagggtttgtttgcctcagctttgcaccttttatcttttggaaaaggagtagaagctgggggtcccttggcagggacatttgcccccagaagtggatgagcccatgcaggggagcacggggagagtgggtcctctttcctgaatgggctctagagatccatgcaatcctgcagttgcacacacagttgtgttgtttatgtcctgaacacttttccaagaagaaagtccccatcatttctcagcttctcaaggaaatctcacctcaggaaaaaacagctgtagtacgagaaggaaagcctaaccttggaaccttgagaaacatctccaattcaaaaggcacacattccctgtagccaacagggaaataaaggaaattaagtgaaggtagagcctgcctggagggtggggagaggtgtggagccaactggcctggtcagacgacaacttgaagtcaagtgagagaggaagatcgaagatcagtgcctgtggattttttgagagtgctggcttgtctggaggctgaggtgggaggatcgcttgagcccaggaggtcgaggctggatgagttttgatctgcgacactccagcttgggcggcagagtgagaccatgtttctttttttgtttgtttttgtttttttgagacggagtctcgctttgtcacccaggctggagtgcaatggcacgatctcagctcactgcaacctctgccttctgggttcaagcgtttctcctgcctcagcctcccgagtagctgggattacgggcgcatgccactaggcccggctaatttttgtattttttagtagagatggggttccttcatgttggtcaggctgatctcgaactcctgatcaacccgcctcagcctcccaaagtgctgggattacagacgtgagccactgtgcccggccgagaccatgtttccaaaaataaaaaaaagagtaaggccaggtgtggtggctcctgtctgtaatcccagcactttggggggctgaggcagcgtatcacttgaggtcaggagtttgagaccagcttgaccaacgtggtaaaaccccatctctactaaaaatacaaaaattagccaggcctggtggcagacatctgtaatcccagctactcaggaggttgaggctggagaatcgcttaaacctgagaggcagaggttgcagtgagccgagatcgtgccattgcactccagcctgggtgacagaacgagaccccatctcaaaaaaaaaaaaaagtgcttgggggttttggcagcctcagtttccaggcagcagaaggtagagaaatgctggggagctgaggaactgaagccagggaggggaggttattatcttttaagataaaaggaagcacagattaagagcctaaagaggtctgggctgggcctaaaaggatggtagtaggaaaacagcttcctgcccccaaattgcaggatgctgaagtttaactattctttaagttctgccaaaatcgagtccaagggtagccctccatccccttttttcttcagagaaatcccccactttctgtgctcccccaccgtctactttttctatgaaagtttgtggaatctcatcaactgggattcagttctttgaaaaattctgtagaggcaagtctggttctggagagatccaggttttgctgcttgcttattttattttgttttatttatttatttatttatttatttatttatttatttatttatttaaatagagacaggctctcactatgttgcccaggctggtcccaaactcctgggcttaagcaatcctcctgccttggcctctcaaagtgttagaattacaggtgtgagccaccatgcccagccttgcttgatttttgaggcaggttatggaaccacagaaactcttggaagataccttaaaaggcatctgtttttttttaatgacccatctgaagcttagatgtcctttttaatgcccctcttcagtgtgcatctgtgtttgaatctgtccagtgctggggagctcactactgttcctagttcttaaattttcttgttaagtaggggaaattcctgtcttgtctccctaatgttgttaaagagataaaatcccctttaacaatattagtgattgttgaagggatgcaaatcagatgttttatgtaagagtctttttttatctgtaaagtggtgatgcagtgtgtcagggttcagtgtaggaagccaacatcactctaggtattttaaaaagaagaagatttactatagggaattaggtatgtttaaaaaataattgtagaactaaaggagcaagaatgaaggggccaccccctgggactcttgaacttatgaatgttgcctaaagaccaggggttctctctaggtcctgctgctcagcacacaaaaagcccacgactgagatcgacaaggattgccaaggaagaaggctttaatcgggtgctgcagccagggagataggagctcagtgtcaaatctgtctccctgacctactaaaactagaggtttgtatagcagggaagaaatgtaacaatgtgtaacattttgagatgcagtcttgctctgtcatttaggctggaatgcagaggcctgatcttggctcactgcaaccactgtctcccaagttcaagcaattctcatgtctcagcctctggagtagctgggattacaggcatgtgtcaccacgcccggttactttttttatgttatatattttttttagatggagtctcactctgtcacccaggttggagtgcagtggtgagatcttggctcactgcaacctccgcctcctgggttcaagtgattctcctgcctcagcctcccgagtagctggaactacaggcgcatgccactacacttggctaatttttgtatttttagtagagacaagctttcaccatattggccaggctggtctcaaactcttgacctcgtgatccacccgcctcggcctcccaaaatgctgggattataggcgtgagccactgcgcctggcctaatttttgtatttttagtaaaaatgggatttcgccatgttgaccaggctggtctcgaactcctgacctcaaatgatccacccaccttggcctcccaaagtgctgggattacaggtgtgagccaccacacctgacctatttttctaaaagggtcttttttttagtatttggtagatactaatatagccataccacccttttggctttcaactaatctgtctttatacttaaaagtatgctttttatagacgtgatagaactgggtctttcttgctttttaatccaatctgacaatctttgcctttttgttttgtttcactttttttgttttgttgtgttttcagatgggatcttgttccattgcccaggctggagtgcagtgatacgttcacagctcactataccttcaatgccctgggctcaagtgatcctcctacctcagcttcccaaggagctaggactacagatatgcatcacctgacatggatttttttttttttaattctcttttgtggagacacggtcttactatgttgcccaggctggtctcaaactcctgggctccaagtgatcctcctgccttggcctcccaaagtgctgggattacatgtgtgagccattgtacccagccaatctttgtcatttaattggatgcttggatcatttacatttaatgtaattactcatatgtttgagtttaaggctataaattgttgatcagtttccatttcatttccccttcttttttttattcctattaattattttttagcgatgggttctcaccctgtcacccaggctggggtgcagaggtgcaatcatagctcactgcagcctcaaactcctttgctcaggtgatcctcctgcctcagcctaccaagtaactgaaacctggctcatttcctcttctgttctttgttcttatctttttttgaggagagggctaattgaatatttttcactgtgtttatatgcctttttatttcttcttcttattattatttgagacggagtcttgctctgtcaccaggttgaagtgcagtggcgcgattttggctcactgcaacctccgactcctgggttcaggcaattctcctgcctcagcctcccgagtagctgggattacaggcacgtgccaccatgcctggctaatttttgtatttttagtagagatggggtttcattgtgttggccaggatggtctcgatctcctgacctcgtgatccgcccaccttggcctcccaaagtgctgagattacaggtgtgagccactgtgcccagccttgcctttttatttcttaagatgttctaaggattatagtatgtagcaccttgaaaaagggagaagcatcaaaacttttatcattagtgatggaaaccaatcgctaggtaggcagatcaatttactagatactgatttaatcttgaaatgatgaattaagtaacatgatatgaaaactaacttaaaaacaatattttatgctttacagaaatacacggccgagcacagtggctcatgcctataatcccagcactttttggggactgaggtgggcggatcacttgagcccaggagttcaagactagcctgggcaaaatagtgagaactcatctctacaaaatatcaaaaaattattcaggcatggtggcatgcacctgtagtcccggctgctcggcagggggatgaggtgggaggatcacttgagccaggctgaggaggtcgagactgcagtgagccatgatcttgccattgcactccagcctgggcagcagagggatacctgtttatatgatttaattaatcatacaaatgtttattttattttccttttggacatttagtgtaatttttaagaatgaatgtaaatactctacactagagccctggaaatagttctgctacaatacaacatgacatacgcattctaaaaattaccacattaagcagaactgcacaatgaaaccacaggtctcacggggaaaatttggttaagggcacaatattctaaaactttgtcagtgacacatctgaaaaaaggaactgaataaaaatgatatagttttataaatgttaaatggttaagaaatacataactactatggtaaatttggcattttatttgaaaaagtcttcaaattaccttgtggaaatgggtttggagagttaggcttttgagcagttgagaagcagtgggaggaaggttatctggaattggatggaaagttgtaacatcaaatgtgtttggtgtgactcagtgcacttgttgagctgagctgtgtgcattttttgtgtattaccacgaagctcaattcagcttggtgcagttttctacctggtgtttctcagtagacagaaatgcacatcctattatgcctaattgttccgtaacatatccatcctgttggagcaattttgtgttttcaaagtaagtatagaataaatagctcagaagccttggacttgcagagcttcaggaaggctgaccaagccttgctcctgttagctgtctgagggagagagctggccccactgacttcctttggaccacctcccagaaaattggcgctggaagggtcttctgttcttctgacccaattgtgctcgatttcttgtaccataataaacaaacaactccagaggcaggaacttcctatctttgaaggcagctctacttcacccttagggagatctggtttaattcttcttcctgctggcttctcaaggctgtagtgacttgcctgtatcctggggagggatacagctatttttgtataataaagttaaaagaggcggagtggaaggtgggcatggtctgtggctcctggctcatagggtaccacaatttggttgatattcctgtttctgattgtaagaatccagtttcctttttagttcataagcatgatgattgggttttcatgcttgtctgtgagatgtgcctcccttaaatcttgtcatgtcgttggtacattacccatgtgacatgaaaaaaaaaaaaaaaaagaatcccagtgttcacccaaaccataaactgaaaattgggggcatgctgacaaagggggattgtgcctctgggtatgagaaatttcactaagaagccaaaatatcagaccttttagcacactccaatagtttttaaggataatggtcaggcagtttgaaattagaaccattgtgggaagtctttggttggcagccagccagagaaagtctcacagctgctgatgaggtttctgatgggcgtaatgcccgttgctccgggtcctgcgttgccattctcagatggcttatgggctgtccatggggttgtgagaatctgggaagtcacagtctaattctggagctagaaggatccttaaggcagtggcatatccacctaataagtttttttcaggaaacaggtcctggagcacagggtatcttccaaggccacacagctagtcagctcacagcaggtactacccctgtgctctcctagcctttgctattttccaatgcccagtacacacttggcctttggtaaatgacgagagcgtgaatgagtggatgttgggcttttcccaaagataatctgctgtctgtgcagagcagttcaacaaagagctcatagctatggattttaaacacagtcttatgatttgattatttgaatctcggattgggttttttttttttttttttttgagatgaagtcttgctctgtggctcaggctggagtgtagtggcaggatctcagttcactgcaacctctaccctctgtctccagggttcaagctattctcctgcctcagcctcccaagtagtgggattacaggtgcctgccatcacgcccagcaaatttttgtattttagtagagatcgggttttgccacgttggtcaggctggtctggaactcctgacctcaggcaatccacctgcatcagcctcccaaatgctgggattacaggcatgcgccaccatgcctggctctggattggggttttatactgtattttgttgtaataaaatctgtttaaactttttgttcccttccttctcttaaactctcaagcagttgtttaagttattttccagaaagttctgctctatgcgtggatgatagaatttaacagaaagcggtttctaagagtgtactatctcaccgttagtgtagttggcggaagttgcaggttgctgagtaaggggtatgaagccatttaaatgaggcactttatgcaaatcattttgcctagcagcggcttctggctggaggctttgaaaagcatgaagctgtaaattatttccttatgatggggggcggggaggaatgagggttgccacgggattgcaatttttcttttttcttttctttttttttttttttttttgagacagagtcttactctgtcgcccaggctggagtgcagtggtgcgatctctgctcactgcaatctctgcctcccgggttcaagtgagtctcctacctcagcctcctgagcagctgggactacaggcgcgcgccaccacgcccagctaattttttgtatttttagtagagatggggtttcaccatgttggccaggatggtctcgatctcttgacctcgtgatccacccgccttggcctccccaaagtgctgggattacaggcgtgagccaccgtgcctggccgattgcatattttttggaagcaagagttccagcagggctgagtctctgacttctttttttttttcttgcagaggggtgtggcagatagctggacccagggcttgagaggaacaccaatgctcatttcatttgcctttcattatggattgcttgagggtattctctgattattagagagaactggcaactggtggggaggtggctcttgcttgtaatccccagtactttgggaggccgaggtgggcggattacttgagcccaagaattcgataccagcctgggcaacatagtgaaaccccatctctacaaaaaaatacaaacattagatgggcgtggtggcgtgcacttgtagtgctagctactctgtaggctgaggtgggaggatcacctgaggctgggaagttgaagctgcagtgagccatgattgtaccactgcaacccagcctgggtgacatgacaaaagacatgaaaaaaaaagagagagaaagccctcttcttctcttcttagcatttcattctccttttttgatgtttgtaaaacaattagagagtcctgtgcaaagctgatatttaacttacccccagatgccaatagcactcaccagtctttgtgaaaacactgcccctgcctttactaccaaggatgcacctgacccctggggcaggcagtgatactgcccagaaaagaaacactggggccgggcgcagtggctcatgcctgtaatcccagcactttgggaggccgaggcgggtggatcacctgaggtcagaaattcaaagaccggcctggccaacgtggtgaaaccccgtctctacaaaatacaaaaaagttagcccggcatgatggcgggaggttgaagcaggagaatcgcttgaacctgggaaatggaggtttcagtgagatgacaatgcaccattgcactccagcctgggcaacagagcaagaccttgtctcaaaaaaataaaaaaagaaaagaaaagaaaaaagaaacactgggccaggtgcggtggctcatgcctgtaatcccagcactttgagaggcggaggcgggtggatcacctgaggtcaggagttcgagaccaacctgggcaacatggtgaaacccccgcctctactgaaaatacaaaaattagctgggcgtggtggcgtgcacctgtaatcccagctacttgggagactgaggcaggagaattgcttgaacccaggaggtggaggttgcagtgagccgagctgccatggcactctagcctggacaacagagcgagaatctgtctcaagaaaaaaaaaaaaaaaagatttaggacttaagctacttgaagtatttgatgggaggaaaaggacaaacctgctttctactgagaattaatttaaacatatttttggtgtggattttttaggcttttttgtgcatatagttcagaggcggtgtagctgagaagttaagagccagttctaatgataggaagcctgagttccggtatgttctcagccatttactggtggtgtgcccttgatcagttacttcatctgtctgttgtttagtttgtacatctgtaaaatgggataatccctaggatctcttttataggattttgcgcttggaacagtggctggcccacagtatgagttcataaatgttagatgttgtagttttggggaggaccgtcactctcccttgggatactgatatccaaattgtaagttgtcagtaggctttctttgaagtttgctccacaccctttccattaaaataagtaatgtgtagatccagtatttaaccgtgataaaatgggttaaaaaggagtccattaaaagtattgagaaaagatgggtgaacttttaaaataatctaaaatggccaagatttttctaagcatgacacacagttattcgtagaacagggatccacttgccttaatttgcacagtgttcttataaatcaacagaaagtacacataacagaaaaatttaaaaggttagggatcatttaggaaaaaatgcaaatgccaacaaatgtgagaaaatgctcaatcttacttataatttaagaactacaattcagccaggcgcggtggctcatgcctgtaatcccagctacttgggaggctgaggcacgagaattgcttgaacccaagagggagaggttgcagtgagccaagatcatgccactgcactccagcctgggcgacagagcaagacttgtctcaaaaacaaacaaacaaaaaacaacaaaaaaattaccattaaaaatgagagagttttcattggcaaagttaaaaagaaaggtgaaagaaaaacctactcttcttgatttgtgtttgttcacttatggagaatttattttgtcataatgtctgaatcataattaaatatgttcttgggtctagcagttcttctatttcttgtattagaagtaaacttggaacatcttaaacactgataatgaagactaatttgaaataaaaagttactagcctttcatacaatgaaatatgttgccgttaaaaagaatgaaattaacaatggaatattatacagccttaataaagaaggaaaacttgtcacatactacaacgtggttgcacctcaaggacattatgctaagtgaaataaaagtatacaataaaagtcacaaaaggacaaatactgtatgattccactcatatgaagtgtctaaagtagtcaaaatcatagaaagtagaaaggtggttcccaagggcccagaggaggtaggagggagaacttgtgtttagtgggtatagcgattcagtgctgcgtgatgaaaaagttatagaaatctgttggacaacaatatgaatatacttaacactactgaactgtacacttaaaagtggttaggatgataagtttaatgttatgtgtgtttcagcatagtaaaaaaaaagagtaagttaaatctgtgaggaacaggtagccaagataacagtgttagttaagtaggggttataaaaagaggaggttaaagaacactgtgtctatgatgaacccaattatggtttccaatttgaaaggcatgtatgtatccatgtatgtaggtacatatatatgcaataattctgagagttttaaagatatcctagaaactgccaccggtggttacagcaatagagtaataataggaggttggagggtaggggataacgttgggggcatttgtttttcattcaacaactttaaagcttattttagcaaacctaaatgtgcgaaattcatcatgttttataattgtatttgctagcactgttttcattttgatatcatccctgccctttgtggtgggagtggtggtagtgtgtgatgtgtttagaagtgggtttggagataacagagtttaacacatttttgcattagaaaggaaacatcaatttggttgcacaactggtatgaatatgtggtgtaatttatttttatcaacattgtctacaatttacatatgtaaatgtagatttttcttaagtgtagtgaggtgaatggaactggaaaaaacgggtacgccaatcctaaaacaatggtgctaagattaaactgtcagatcagtctttgtcaagtgctccagctggctgtggattattaggaagtattattcaaagggctgctttggtacaagacaagaaaattgctggagaaatgactgctctggtgctaagattcagccatttcaaatgtgcagtctcttaaaagtaaaagttggggtcgggcatggtggctcacgcctgtaatcccagcactttgggaggctgagacggacggatcacgagttcaggagtttgagaccagcctggccaatatggtgaaaccctgtctctactaaaaatacaaaaattagctgggcatggtggcgggcacctgtagtcccagctactcaggaggctgaggcagaagaatcacttgaacccgggaggcagaggttgtagtgagccgagatcatgccgctgcacaccagcctgggcgacagagtgagactctgtctcaaaaaaaaaaaaaaaaaaaaaaaagtaaaagttgaaagatctataaaatacttcctgtaaactttacaaagcattttacagcagactaataacttaagaaacatatgaagcaatttcagctcctaaagtcctaggaatttgcttttggggatactttttatttataggatacttcctatttatttataggatacttcctatttaaattaacaagtgttcaaaaaaaaagtcctagttttatttttattcttaaagtggcattggagagatgtccacacttgcacttctctaatgagcagagatgtccaaccaagtgattttagaattattgagttttttttaaacttatcctaaaatggctattaggttatttttaactaaagaaattattattgtttttttgagatggagttttgctcttgttgcccaggctggagtgcaatggtgcgatctcagctcaccgcaacctccgcctcccgggttcaagtgattctcctgtctcagcctcctgagtagctgggattacaggcatgcaccaccatgccctgctaatcttttgtatttttagtagagatagggtttctccatattggtcaggctggtctcgaactctcgacctcagatgatccgccctccttggcctcccaaagtgctgggattacaggcgtgagccaccgcacccggccttaaagaaattattgctaaagtaaaaagtagtttcacatagcatatacagcccagtcatttaaagtgtgcaattcagtggttttatagtatatttacagagttgtggaaccatcatgacaacttagtttttgtcacctctatgcttattagcagtcactcccagttccctcccaaactccctcagagccctggcaattgttaatctacttgctgtctctatgggcttttgtagacgtttcctattaatgaaaccatataatgtacagtctttaggactacttctttaacttagtatgttctcaaggttcatccatgttgtagcacgtgtcagtacttcattcctttttattttttttttttgagatggagtctcgctctgtcaccaggctggagtgcagtggcgtgatcttggctcagcacaacctctgcctcctgggttcaagtgattctcctgcctcaacctcctcagtatttgggaatataggtgtgtgccactatgcccagctaattttcatagttttagtagagatggggcttcactatgttggccaggctggtcttgaactcctgacctcatgatccacccgccttggcctcccaaagtgctgggattacaggcgtgagccactgtgcctggccagtacttcattccttttactggaatataccacactttactgaaacccattccttgctgatgatcatttgggttgtttccactttttttttttttttctttgagacagagtctcactctgtcgcccaggctggagtgcagtggtgtgatctcagctcactgcaagctccacatcccgggttcttgccattctcctgcctcagcctcccgagtagctgggactacaggggcctgccaccatgcccggctttttttttgtatttttagtagagacagggttttacggtgttagccaggatggtcttgatctcctgacctcgtgatctgcccgccttggcctcccaaaatgctgggattacaggcgtgagccaccttgcccggccttttttttttttttttttttaagacagaatcttggtctgtttctcagggtggagtgtggtggcacagtcgtggctcactacagccctgaaccctcaggctgaagtgatcctcctgcctcagcctctcatgtagctgggaccacaggagcatgccatcatgcttggctaacttttttggtattttatagagatgggatctcactatgttgcccaggctggtctccaactcttgggctcaggtaatcctcccttcttggcctcccaaagtgctgggattactggcatgagccactgcacctggccattcttaatgagttaatttttgtctggtatggggaaagggtccaacttcattgttttgcatttgaatatccagttccaccaacatttgttgaaaagactattctttcccagttgaattatcttggcagaattagttgactgtcagtgttaagctttatttctgggttctcgattctattgattttttttttttttaatttgactgtacgttggaagaattattcatctggaatttagacctactggggctggtggtcatgacgctggaggttgtgttttgggaactggtgaccagtcattcttagatggctgactcattttttttgtgaccatgagatttaaacatttatagagatttaattgtaagtaacaaaggcctgcagtagatgctgttacaggcatgagaaatgattttgtttatacagatcacaaactataaatacagtggcagtggtcactggagccatccatatatcacagttaaactgttctcctgagtaatggggttgtcagcactgaagtacacttccttgccatgtggagcagtagccggttctttatttaatattttcatttactaagcaataacttaattggaaaatgaattttgattgggttttctatagttaactgtttcttaaaagtactattccctttttctcttttccacattcactttggtgaggtagttaagaatactggctttgaaactacctggggctgttgcagtggctcacacctgtaatcccaccatgtgagaggctgaggtaggaggactgcttgaagccaggagttcgagaccagccgggcaannnnnnnnnnnnnnnnnnnnnnnnnnnnnnnnnnnnnnnnnnnnnnnnnnnnnnnnnnnnnnnnnnnnnnnnnnnnnnnnnnnnnnnnnnnnnnnnnnnnnnnnnnnnnnnnnnnnnnnnnnnnnnnnnnnnnnnnnnnnnnnnnnnnnnnnnnnnnnnnnnnnnnnnnnnnnnnnnnnnnnnnnnnnnnnnnnnnnnnnnnnnnnnnnnnnnnnnnnnnnnnnnnnnnnnnnnnnnnnnnnnnnnnnnnnnnnnnnnnnnnnnnnnnnnnnnnnnnnnnnnnnnnnnnnnnnnnnnnnnnnnnnnnnnnnnnnnnnnnnnnnnnnnnnnnnnnnnnnnnnnnnnnnnnnnnnnnnnnnnnnnnnnnnnnnnnnnnnnnnnnnnnnnnnnnnnnnnnnnnnnnnnnnnnnnnnnnnnnnnnnnnnnnnnnnnnnnnnnnnnnnnnnnnnnnnnnnnnnnnnnnnnnnnnnnnnnnnnnnnnnnnnnnnnnnnnnnnnnnnnnnnnnnnnnnnnnnnnnnnnnnnnnnnnnnnnnnnnnnnnnnnnnnnnnnnnnnnnnnnnnnnnnnnnnnnnnnnnnnnnnnnnnnnnnnnnnnnnnnnnnnnnnnnnnnnnnnnnnnnnnnnnnnnnnnnnnnnnnnnnnnnnnnnnnnnnnnnnnnnnnnnnnnnnnnnnnnnnnnnnnnnnnnnnnnnnnnnnnnnnnnnnnnnnnnnnnnnnnnnnnnnnnnnnnnnnnnnnnnnnnnnnnnnnnnnnnnnnnnnnnnnnnnnnnnnnnnnnnnnnnnnnnnnnnnnnnnnnnnnnnnnnnnnnnnnnnnnnnnnnnnnnnnnnnnnnnnnnnnnnnnnnnnnnnnnnnnnnnnnnnnnnnnnnnnnnnnnnnnnnnnnnnnnnnnnnnnnnnnnnnnnnnnnnnnnnnnnnnnnnnnnnnnnnnnnnnnnnnnnnnnnnnnnnnnnnnnnnnnnnnnnnnnnnnnnnnnnnnnnnnnnnnnnnnnnnnnnnnnnnnnnnnnnnnnnnnnnnnnnnnnnnnnnnnnnnnnnnnnnnnnnnnnnnnnnnnnnnnnnnnnnnnnnnnnnnnnnnnnnnnnnnnnnnnnnnnnnnnnnnnnnnnnnnnnnnnnnnnnnnnnnnnnnnnnnnnnnnnnnnnnnnnnnnnnnnnnnnnnnnnnnnnnnnnnnnnnnnnnnnnnnnnnnnnnnnnnnnnnnnnnnnnnnnnnnnnnnnnnnnnnnnnnnnnnnnnnnnnnnnnnnnnnnnnnnnnnnnnnnnnnnnnnnnnnnnnnnnnnnnnnnnnnnnnnnnnnnnnnnnnnnnnnnnnnnnnnnnnnnnnnnnnnnnnnnnnnnnnnnnnnnnnnnnnnnnnnnnnnnnnnnnnnnnnnnnnnnnnnnnnnnnnnnnnnnnnnnnnnnnnnnnnnnnnnnnnnnnnnnnnnnnnnnnnnnnnnnnnnnnnnnnnnnnnnnnnnnnnnnnnnnnnnnnnnnnnnnnnnnnnnnnnnnnnnnnnnnnnnnnnnnnnnnnnnnnnnnnnnnnnnnnnnnnnnnnnnnnnnnnnnnnnnnnnnnnnnnnnnnnnnnnnnnnnnnnnnnnnnnnnnnnnnnnnnnnnnnnnnnnnnnnnnnnnnnnnnnnnnnnnnnnnnnnnnnnnnnnnnnnnnnnnnnnnnnnnnnnnnnnnnnnnnnnnnnnnnnnnnnnnnnnnnnnnnnnnnnnnnnnnnnnnnnnnnnnnnnnnnnnnnnnnnnnnnnnnnnnnnnnnnnnnnnnnnnnnnnnnnnnnnnnnnnnnnnnnnnnnnnnnnnnnnnnnnnnnnnnnnnnnnnnnnnnnnnnnnnnnnnnnnnnnnnnnnnnnnnnnnnnnnnnnnnnnnnnnnnnnnnnnnnnnnnnnnnnnnnnnnnnnnnnnnnnnnnnnnnnnnnnnnnnnnnnnnnnnnnnnnnnnnnnnnnnnnnnnnnnnnnnnnnnnnnnnnnnnnnnnnnnnnnnnnnnnnnnnnnnnnnnnnnnnnnnnnnnnnnnnnnnnnnnnnnnnnnnnnnnnnnnnnnnnnnnnnnnnnnnnnnnnnnnnnnnnnnnnnnnnnnnnnnnnnnnnnnnnnnnnnnnnnnnnnnnnnnnnnnnnnnnnnnnnnnnnnnnnnnnnnnnnnnnnnnnnnnnnnnnnnnnnnnnnnnnnnnnnnnnnnnnnnnnnnnnnnnnnnnnnnnnnnnnnnnnnnnnnnnnnnnnnnnnnnnnnnnnnnnnnnnnnnnnnnnnnnnnnnnnnnnnnnnnnnnnnnnnnnnnnnnnnnnnnnnnnnnnnnnnnnnnnnnnnnnnnnnnnnnnnnnnnnnnnnnnnnnnnnnnnnnnnnnnnnnnnnnnnnnnnnnnnnnnnnnnnnnnnnnnnnnnnnnnnnnnnnnnnnnnnnnnnnnnnnnnnnnnnnnnnnnnnnnnnnnnnnnnnnnnnnnnnnnnnnnnnnnnnnnnnnnnnnnnnnnnnnnnnnnnnnnnnnnnnnnnnnnnnnnnnnnnnnnnnnnnnnnnnnnnnnnnnnnnnnnnnnnnnnnnnnnnnnnnnnnnnnnnnnnnnnnnnnnnnnnnnnnnnnnnnnnnnnnnnnnnnnnnnnnnnnnnnnnnnnnnnnnnnnnnnnnnnnnnnnnnnnnnnnnnnnnnnnnnnnnnnnnnnnnnnnnnnnnnnnnnnnnnnnnnnnnnnnnnnnnnnnnnnnnnnnnnnnnnnnnnnnnnnnnnnnnnnnnnnnnnnnnnnnnnnnnnnnnnnnnnnnnnnnnnnnnnnnnnnnnnnnnnnnnnnnnnnnnnnnnnnnnnnnnnnnnnnnnnnnnnnnnnnnnnnnnnnnnnnnnnnnnnnnnnnnnnnnnnnnnnnnnnnnnnnnnnnnnnnnnnnnnnnnnnnnnnnnnnnnnnnnnnnnnnnnnnnnnnnnnnnnnnnnnnnnnnnnnnnnnnnnnnnnnnnnnnnnnnnnnnnnnnnnnnnnnnnnnnnnnnnnnnnnnnnnnnnnnnnnnnnnnnnnnnnnnnnnnnnnnnnnnnnnnnnnnnnnnnnnnnnnnnnnnnnnnnnnnnnnnnnnnnnnnnnnnnnnnnnnnnnnnnnnnnnnnnnnnnnnnnnnnnnnnnnnnnnnnnnnnnnnnnnnnnnnnnnnnnnnnnnnnnnnnnnnnnnnnnnnnnnnnnnnnnnnnnnnnnnnnnnnnnnnnnnnnnnnnnnnnnnnnnnnnnnnnnnnnnnnnnnnnnnnnnnnnnnnnnnnnnnnnnnnnnnnnnnnnnnnnnnnnnnnnnnnnnnnnnnnnnnnnnnnnnnnnnnnnnnnnnnnnnnnnnnnnnnnnnnnnnnnnnnnnnnnnnnnnnnnnnnnnnnnnnnnnnnnnnnnnnnnnnnnnnnnnnnnnnnnnnnnnnnnnnnnnnnnnnnnnnnnnnnnnnnnnnnnnnnnnnnnnnnnnnnnnnnnnnnnnnnnnnnnnnnnnnnnnnnnnnnnnnnnnnnnnnnnnnnnnnnnnnnnnnnnnnnnnnnnnnnnnnnnnnnnnnnnnnnnnnnnnnnnnnnnnnnnnnnnnnnnnnnnnnnnnnnnnnnnnnnnnnnnnnnnnnnnnnnnnnnnnnnnnnnnnnnnnnnnnnnnnnnnnnnnnnnnnnnnnnnnnnnnnnnnnnnnnnnnnnnnnnntttttcctttttctctcttttcttcctttatgttttctctacttattttgtcttttcctcatttttcagtcagtatagcttataaaattttttctgattataaaagtagggcataggccaggcgcagtggctcatgcctgtaatcccagcactttgggaggctgaggtgggtggatcaccttaggtcaggagttcaagaccagcctggccaacatggtgaaaccttgtccctacaaaaaatacaaaaattagccgggcgtggtggggggcacctataatcccagctactcaggatgctgagacaggagaattgtttgaacccgggaggtggaggttgcagtgaactgagatcatgccactgcactccagctctgggcaacagagccagactccatctcaaaaaaagtagggcatattatgccaaaaatttaaattataatcctcttacttgtgaaaaatggcaatatgagtatttacttcatgggattattgtgaggatgaagtaaatccatgctaagaactgaggaccctacctggcacctagaaaatgcacaatgcaatttcctattatttaaaaaaattattattagtatcactgccacaaattacaagaagaatgaagaatggctttcggaacggtggtgggatgcccaaggctgtgctgtgttctcgcagaaagcattgggaatggcacatctcaaggtcaggactagccctcacaaggggcagcatccagtgggctcttctgactgctgtaggtgcatgcacctgttttagggtctctcttgattttatgtttctataggggagtaggtggaggaggggtcaaaacagtatattccagatatcctgagatctggtgaaggaaaactggttttggaatcctgttgggctctggaatcagagatcaggattttggtttatcccaaagtggcttctggaaagtcggttaacctctgagactcagatttcctcatctgtcaaatggagattgtgatacttctatcaaagggttatttttggccggatgcagtggctcatgcctgtaacatggcaaaaccccgtctctactaaaaaatacaaaaaattagccaggcatcatagtgtgcacctgtactccagctacttgggagtctgaggcacgagaatcgcttgaagtgggagttggaggttgcagtgagctgagatcgtgctaccgcactccaacctggggggacagagtgagacactgtctcaaacaaaaggcaggggggtggtttttttttttcctttggggagattaaatgaaaggtcttgaaagcaccttagagtagtaccttgatacataggaagtacttaagaaatgataggtaactattacttataatgagtgctgggtagaaggatctccttggttaccaaagacactcacatctttaattttggtgtttcgatggaagcacaggatataattctctgcctccttaaattgttgaacgtgctgcaaagtttgacatttagaaatagaactagggctgtggggctttgttccgtctttagggctttgttctctgcccttgcgtacacactcgtgtgcatgtgtgagtgcatattacacaggtgcatgggataaccctactcttttaaggcagtatggaagtagcaaagctgctgtctttgtcttttcgggtgttgctggtctcctctgtcagcaccatcaaggctttgctgctcattgcactcatccagcagggtgctatcaggaagaaggagaatgagttccaaaaataaggtaacttattcaggcttcacatttgtctctatgttgggaatgatgctactctccctgcctgccttgtggaatggttataaagatagaatgagaggaaggttgtgaaggtgtgatcaaggtgttacaccaatcattaaacattataaagtattgcaaacaaatggacttaggagtcacctgactgaggcagaaattccagttctatttaataggtttgtctgtgttatttgatccactttctcattataatagaggtggatgataacagcatagggctgtgataaacattaaattctgtaacttatgtaaagaatctagtgaagtatatgttgcacataacaggtactcaaaaagttgtgtttgggttagtcaggagtttgagaccagactgggcaacatggtgaaacccagtctctactaaaaatacaaatgttagctgggtgtggtggcgtgcccctgtaatctcagctactcgggaggctgagtcaagagaattgcttgaacctgggaggcagaggttgcagtaagccaagatcacgccattgcactccagcctgggcaacaagagcaaaacttgtctaaaaaaaaaaaaaacaaaaaaaaacaaaaaaaaaaacgctgggcgtgatggctcacgcctgtaattccagcactttgggaggccaaggcaggtggatcacgaggtcaggaggttgagaccagcccgaccaacatggtgaaaccccgtctctactaaaaatacaaaattagctagacgtggtggtgcattcctgtaatcccagctactcgggaggctgaggcaggagaatcacttaaacccaggagatggaggttgcagtgagccgagatcacaccatcgcattccagcctgggcaacaagagggaaattccgtctttaaaaaaaaaagttgtgtttttatacacttttcaagagctgttgcttctgttactattgtttctgctgcctattttctcttttcttccccaatttctcccttctttggaaggactggatgttggctaacatggtggctcatcaaacatgactgtttttttttcttttgagacagggtcttgctctgtcacccaggctggagtgcagtggtgcagtatctgctcattgcagcctcgacctcctgggctcaagggatcctctcacttcagcctcctgagaagctgggactatagtcgtgtgccaccaagcctggctaatttttgtattttttgtaggggtggggttttgccactttgcccagggtggtcttgaactcctgtggtctcaaactcctggactcaagccatctgctcgcctcagcctcccaaagtgctgggattacagggataagccactgtgcccagattcatttctgacttttctttttcttttttctttttttttttttttttgagacggagttttgttcttgtcgcccaggctggagtgcaatgacaggatctccactcactgcaacctctgcctcccaggttcaagcgattctcctgcctcagcctcccaagtagctaggattacaggcgcccgccaccacgcccagttaattttttttttttgtatttttatctgagacggggtttcaccatgttggccaggctggtcttgaactcatgacctcaggtgatctgcctgcctcggcctcccaaagtgctgggattataggcgtgagccaccgcgcccggcttgacttttctaactttctcgttgatgagtagatagttgtatcatcacagattaaatcttgaggttttcatctattcctggctatggtgagagctacccaccctgccaagctcaggaatgcattctttcaaatcattctggatgcgtagggtactaggaatttagtctgtatgattgcattttattttaatttaattagaactttgaccctcgaacttgctctcagggtgggatattctttagaaagcatgaatagcctatccttactgtataccatgagaaagttagtgatactaaccagttataattttataaaagaatatgatgatatatatagtcagccctctgtatccgtggattctgtgtctggattgaacaaaccatggatcaaaaatatttggggaaaaaaacaaaacaataaaaataatacaaattaaaaaatatagcacaacaaatttacatggcatttacattgtatcaggtattatgagtaatctagagataatttaaagtatataggaggatatgcatagattatatgcaaattccattttatatcagggacttgagcatatgagaattttgatattcacgcgaggggtcctggaaccagtccctcgcagatactgagggatagctatatgccttataaaatcccaggcatatttgtttatgaaaaggcaagctaggctgggcacagcggctcatgcctgtaatcccagcacctgggaaggctgatgctggtggattgcctgagtccaggagttcaagaccagcctgggcaacatagtgagacctcatctctataaaaaaataaaaaaaattagccaggcattctggcacagtagttccagccagttgggaggccaaaatggaaggatcacatgagcccaggaggtcgaggctgcagtaagctgtgaccgtaccactgtactccagcctgggcaacagagtgagactgtctaaaaaactggccggtatggtggcccacacctgtaatcccagcactttgggaggccgaggcgggtggatcacctgaggccaggagttcgagaccagcctggacagcatggtgaaatcccatctctactaaaaatacaaaaaattagccaggtgtggtggcaggcacctgtaatcccagccacttgggaggctgaggcaggagaattgcttgaacccaggagccagaggttgcagtgagccgagatcgctccattgcactccagcctggacaacaagagcgaaactccgtctcaaacacacacacacacacactcacacactcacacactcacccacaaaaaacccaccaaaacttctgggttggatctggtgaggtcacaattttggatttggttcccacgtggtccagttttgttattatgaagtaaatctctgtttcagaggccaccatatcacatttctcgagtctccttgtagacacctaacttgtccgtgatgatgtgaggtaataacaggagataatgattcagcaaagctttgtcccgccactgagaaattgctttgaaacagtggcccatccacagttgcaaagtgggggtgattcttcttcagggagcatagcgtagcagattttcccctgcgtcctctgtgtttgttcctcagtgtctggaaagtgcttaccctagagagtgagcttgggaccatttttattaaagctattattattattatttgagacaaagtctcactttgtcacccaggctggagtgtggtggtgcgatcacacctcactgcaacctccacctcctgcgtttaagtgattctccttgcctcggcctctcaagtagctgggactgcagatgggcaccaccacgcctagctaattaagaaaatttttttgtagagctgatgtctccccacaacccagggtggtcttgaactcctgggctcaagagaccctcccaccttggcctccctaagtgctgggattataggcgtgaaccaccgtgtctggccattaaaggtatcctcaaaactcattttatagtatttattttcttttgatgttcattgattttttttttttttgctaaagttgtcttgctttttaatgtagaccaatggagtgcattttacagacaacaaaacatatcctatatggtgggtagcaaattaaataggctttttactttttttctactctttgattctttacctattaaaatattgcagttttctcttcatttaaaaaacttatgaaattcgtgcttaatgttaaaccttgaaaacatagacaagataaagtaaacaaaggccatctaacatcccataatcctggttaatatttttgtgtattcatctctcctaaggatgtgtccattagcattttttccaggttgaattacagatacctttttcagagactgcatgctagtctctcatgattcccttatctgttatattgaagtcgtgtgtgatcgcacgggaaacttgcttttgttatttgccatcaccaaaggacccttctgaatgaagagcgagggcagctggctgttgggtgtgtggcgtgttgtcatcacttgaacacaggattattaaaggtgcgcaggattgttaaatgtgcctgctgtcggctgatgtcagatgatcccctgggaaggtttatttatttatttatttatttatttttaccctgcaggctccagttctgcttcagcagatctgggatggaggctgagactccccgtgatgcccaggcagctgttcatgagccccctttggagtaccattgagccaaggtcctctagcatggccgagtgctctctgctcttgcagtgaggcagtctctgcttttgttctgctcagggctgacctgttttggggggcttcctccactcttggggggcttcctccacttcctggctcttttccctcatccacgctgctcaagaccccatttcttccctgctgtctcatgcatacatccacgctcctcccaaacctctgttcctgtcactccagcaggctcctccatctccccaggccaccctcctaccaccaccactcccaccaccacatcagagtccttttttttccagttactacttgattgcccccctccccacttcacccctcagtttcctgtctggagccctcagattcctttctctccatggagggcagtgactcagaggcgcctacctcagaggcggcatcaatcaggtgtgtcctggccccaaactagctctccacttggggctccctgagtgttgaggccttggatttccttgcaggggaaggaaggaggggtgagaaagatccagaatcttcaaaggagccttctttgcccagtccaacatccactccacccagctgactggagaaataaatgctaggtttgactgaacaaataacagtaattaagatctgtttcctgaacagcctacccctttggcctgtttactttgcagcccaataacaattcattcagtcagcctggcattgaggtccattgtgtatgattttgttgccggagtgctagtcttcacaatctagggctgatagaagacttctgccttgtaattttaaaaagtagagggaacaccgctgccaatatgagcaagttacttgtttctatctctctctctttttttttttttatttttatttattgagacagagtcttgctctgtcgcccaggctggagtatggtggcgctgtctgggctcactgcaacctccgcctctgagttaaagcgattctcctgccttgctctcctgagtagctgggattacaggcatgtgccaccatacccagctagttttttgtatttttagtagaggcggggtttggccatgttggccaggctggtcttgaactcctgacctcaggtgatccacctgcctcggcctccaaagtgctgggattacaggcgtgagccaccgcgcctggcctgtgacttgcttctatctctgtactcccgtacttggttgtgtgtagccaataccctgaatgaaaaaaaacaaaaaggtaaaggttggcgggtggtgatgtaaggttattttcatttctgttgatgatagaagaaataagtataagcaccttcatttggccctggttccttttgcaaatgtattttaagaacataaacaggagtttctcaagctgggggcgaaggggtaattgcatgacagttctctgccagttggtgccatcgaggcagctggtgcttgaatgcaggcatcctcacaaaggctgtctagggctttgtgccagcttgccttggaatgaggacctgctccagaagtgggtggaggggtgctgataaaacccactgggcatctggcagtgcttgcttgaaaaggcaatgaacagcggctatttgtttgggggaaaggcacacacctattcgttccttccacttcaagctagaagtggaagaagaagatgaatttcaagggtgaaaagagggaagagctggaaagaaggtttcctgaagtttgagggatgatgaaggctaaagttaactgtgagaaaaagtgttttctcagctgtaggaaaacagtgcagctgttactccaagaaaaaagctgttaaaccaggactttcatggcactaccaggcatccagaacatggggtgggctagaggagtgagggcgaccctgtaggagggacatgcgtcttgagaggttagtgtgggcccatgcctccctttccccttcccctgatcttgcctctgagcactggtactatccaggtacagctgtggttttccaaaccagaggcctgttgtctgacattttgttttctaatttatgtatttatgtgaaaaatattagaaagacttgaaataatcatcttttattggacactgaatcctaaagaacaggattttatgggatctagggtaggtgaagcgtgcaagtttttccttgttcagagcccttgttgctagactaaccaccttgaaagagaaacatattgttactgggcagtggaatgggtcagaggtgttcttttgagtagtgagccctttctgtgatgtggtttgtggggagagcggccagtggttgaatctgcacgtggggtgatttagtcggggctgtcagcttctcagaagcgcaggaagggaggtagtcgggggtgggcattaccatagcacagcctgtagctgttcaagagcaccagacttttttttttttttttgagacagagtcttgctctgtcaccaggctggagtgcaatggcgtgatctcggctcactgcaacctccgactccctggttcaagtgattctcctgcctcagcctcccaagtagctgggattacaggcacgtgccaccatggagtttcactcttgttgcccaggctggagtgcaataatgcaatcttggctcactgcaacctctgcctcccgggttcaagtgattctcctacctcagcctctcatgtagctgggattacgggcatgtgccatcatgcctggctaattttgtatttttagtagagatggggtttcttcatattggtcaggctcgtctagaacttccgacctcaggtgatccgcccaccttggcctcccaaactgctgggattacaggcgtgagccactgcgcccagccaggaacaccggttttgtggccaccccagggttaatgcgacacatgctggcttttcgttttaactgtcatgagggaaacctttcaaaatgtattagactctgagacacttgaaactgccttcttcctaggatcagcagagcatttgtttgtttgtttgtttttgagatggagcagagcgttttttaaagctactaacgatgacttcctttagttgtctcaagtgtctgttagtatattgcacagtagatacagaagtgtggaacccagaggatgagttactagctccttccttttccagactgctgagttgtttgcactgatgtgttttttgatgctccactgatggttgtcactagatttgtccttgagccaaatcacctaacctttctgggcctcggttttcacatcaggaaaataggaggactggactagatcagggacttccagtgcaggttttgggatgtagccctgtttaggttgaattttctggatgctgagtttgattaaaaaatccactaaaatgtgagtttcctgagagcagggactatactaccaactcctagaaccagtacccagtcactagtaagcatttaataaatactgtatgaatatagaactgcatttttggtattatactgcatccatatgtgttacatattgtgcatagaatttcgtttggtggggagaagagctcactcgccgctaaactcttgaagcttctggtgcacttgagttctaaggtcctctgcactccagctctctgagagcagtgaaatgagctcctttctgtttccatccccgagcatacgggcatctagctggcactggggcctgtcaccagcctagaaagcactccgtggcttggcagggtttggggattgggctggcacatagcacctcttggaaagggcttggcaggtttctcccttgcagcataatctccatgacacaatgaggcaaattttgggtttagtgtttcactggctgccggttgataagctactatttataaagtagaacgagcagggtttctgcccaccttcttttttgctgagactatttaaaattaactattttataaattaaaaataaaacttttaaataaacttattttaattaaaaatttgtaaaataaaaatatcaaaataaaaaaattaaaattaaaaattaagaataaaaatgtaaacatcaaacttactttataaatgaaacgagtttttactgtattttattttatttgtttttttagagacagagtctcactctgttgcccaggctgaagtgcagtgatgcaatctcagctcaatgtaacctcaatcttctgggctcaatccatcctcctacctcagccttccaagtagccgggactacaggcttgtgtcaccatgcctggctaatttttgtattttttgtagagacagtgtctcactatgttacccaggctggtctcaaactcctggactcaagcgatctacccacctcggcctcccaaagtgctgggattacaggcaggagccactgtgcccagccctaaaactaattaaaaaaaaatatttaaaacccaatgggtacttttgttttctcccagtctcctccacttctccgttttgagtttcaaggtttcattttcttatacctttttcttaatagaacttacttaactcaccttttcagccctgttctgccacaggtatttgttgcctcagtgggtgccagtgaatgttcccacagctcttgttttttcctcagtggaaatgaaggtgtaaagacggctttagctttccaacaagttttctcacacacataagttgccagcatgctctcctgtgttcagactgaaggtggtgaaccccacagtctgactgtggagatggctcttgcttttcacccctaactcagtggctcttaactggggagccattgtctggagacatttctgatcatcacgccttgcaggggagagggggagttgtgactggcatctagcgggtagaggcagggaggggcgctgctgaacatcagcatccagtgtacaggtcagcccccgacaagaaagaattttctggcccccagtcaatagtgtcgagtgatagaaacgctgctctgaaggacctgcccctgaggaacgtttgttttctgttgagctgtcagaagggatgttgtttaccctcaacctcaaaccttatagatctcaccaacctgctaaaatgtatcaagtgtgatatgatatttttaattttaaggtagagagagggtcctgtgatggaatgattcaaataatcccactgctgtctgagaacagaggacttgataaacattcttctggtgctgaaagtagccctaacctcctgagaaagagactccaaaaaaggggaacatctttgtcccagactccattgtaaccccaaagctgactgatggctttgtatgcgttcatagcctcttcttgcccatttcagacttggttctggtggctggagatactaagttgacccttgactgtttgtttcatggaaatgttcaacgtggaaaataacaccgctctagtatgttgaaacttgtttgagaaaccacttgccagaaactcatctctcacagtccccacaatactgctgccacagttatgggcatgatgatgaaagccttggcgctttagaggattctctgaactcaaaataaaatttaagaaacccagataaaggaactataagagcatatttctagtctaggcagatatatagcttctgtttaacttcttgaacttttaggtagccgtattaatctgttcttgcattactataaagaaatacctgagactaggtaatttataaagaaaagacctttaaatggctcaccattctgcaagctgtacaggaagcatagcaggttctgcttttggggaggcctcaggaagcttccaatcatggcggaagacaagggaggagcaggtgtcttacatggcaggagcaggagcaagagagagagagagtgggagatatcccacacttcagatgaccagatctcatgagaacacactccctgttgtgagaacagtaccaagtggatggtggtaaaccattcatcagaaatcttcccccatgatgcagtcatctgccaccaggccccatctccaacattagggattacaattcaacatgagctttgggtggggacacaaatcctagccatatcgatagctgtttaatttttttattttatttttaattgcttcaaattctaccaagtattggtttatttacatcagttaaactctataaagttttacaaggcttaaggaattttttttttcttgcggggtaaaaaatgcatacataaaatttaccatcttaactactgttttgagatggagtttcagtctcgttgcccaggctggagtgcaatggcatgatcttggctcactgcaacctctgcctcctgggtttaagcaattctcctgcctcagcctcccaagtagctgggattacaggcacatgccaccacacctggctaatttttgtatttttagtagagacagagtttcaccatgttggtcagtctggtctccaactcatagcctcaagtgatccgcctgccttggcctcccaaagtgctgggattacaggcatgagccactgctcctgacccaactattttcaagtgtatagtacaggaggtgtttttttgttcgttttttttttgtttttttaatgcctcaattatggtgatagttcactctggctgttttcttccaatcacattgaagtaggtttgatttactcattgtctgatgcatttaacaaatatttgagggcttaccacctatgaggtggaacaggaatgttttgttttcttccaaaatagaaacctgtaatgtttttctaattataagatgtatgcttgttgcagagagttcagaaaatacagaagagcatagtcactcataattctacaactctgtttactactgttgatgtactgatatatccttctagtttgttttttgttgttgttagtgctgatctatgtcttgttatatttttacccaaaatgctatcatactctacactattaatattaactattttcagtttatacagtgtggacgtctttccatggccataaatttttctgtataacctatataatcatttcagtgggtgtattatattctacaacatgaaccttccgtaatttaactgatcttaaatctaaatctttttattggacatctaggtttcttctcttaaaccacatgtattagatgtgtaatagatgtcatgtagatagtcatcttatgtatatctttgttttcttgcttagagagtgtagaatcaaggtctcttgtttactgcggtattcccaggaattgacaaagcacatagcaggtgtagagtatagtatatattagtgagtgaatgaatggcctggttatttccatagaattaggaaatagggcttttaatatggggtaggatttggtgaggcagggagcttggtgattgcggtggttgagctgcttggggcaagacactagaagaagccatccatgttcactgaggccagagtttgcatgggagacaggaaggggcacagaaagggaagtgacctcttcagatacttgctgaatgcttactgtacacacaggggcagggaagaaaaattgcttcctttttccagtgtagcctgtctccctcctgtaggaaaccgaggtttgaagccagtttcaggccagtgttacctgtcttgttcatgcgcttatgccagcagtaagtggagaagaatggcaaagagcctaccacatttaaattaagtctagtacttgcgggctctgtgaccttaagctgctgtttaacctctctgagccttggtctcgtctctgtaaaatagggatgattgtaacaggtaataataattgttgtgccttgcagaaagtaagagattaataagtgttaactattgctaactaatattatgatggattcagtaagctttagctttcttttttctttctttctttttttttttttttgagatgcagtcttgccctgttgcccaggctggagtacagtggcgcaatctctgctcactgcaacctccgcctcctgggttcaagcgattctcctgcctcagcctcctgagtagctgggattacaagcacccaccaccacatccagctaattttttgtatttttagtagagacagggtttcaccatgttgtccaggctggtctcaaactcctgaccttgagtggtctacctgcctcagcctcccgaagtgctgggattacaggtgtgaaccactgtgcctggctgattcagtaagctttcatgggttgccatgtattcttttgtatgggggaaagccactgtaagccccagataaaccacatgtgtatgtgttgagttttctagaatacaaccatttgtgagttaggaactacctgcagttacactgtttgttcagtaaaacactcctttattgagcagaggaatttttgtgctcgttcttctagcttttaagttgcaccatgccattgcatagctatcaataaaggacagtacctggcactgtggtgccaagagggagggtttaccaacaccccccccccaccccaccactgcccttttgtagtgggaagaaaggtctgtctaagctcagtggaagctatttctgagcttgagatgggaagattaagccacacaatgttggttgttgggtccagaatttcaatgaatgttgctctccaaagtagagaagtgttcatttcttctgcagaccacagttgactcaaaggtaaccctaaagcttcaaaagagaaggaagggaaggaggccctcacacggcatgggcagtattatgtattactgaaaggtgtggaactctgtagttaaaagatgcagtgttgtttacttgaataaaaaactttgaacccagttttatgtttttaatggatgtcttctattaccttggtactataacctcccagcatgctcaggaacacctgagttctaacagcttggtcagcttcagtatttgaggaacttccccactgtgccccatcccactgccgtttattaaggaacagtattataatttttgtagctcacagaaaacttgatgtctttccttagctttggtaggtctcctgtatttccagaattaggaaaagggactgaatgaagggtggtgtcacacttccttttacggtttggacttagtttagacacatgaaagccaacttggctgtccagccccgttgaggagcaagtccttcagaatagttggtttccatatggccgaggggttcatactccccaaaactcaagcactgaagctaaaaactgtgacccacatttgggatcattcttgtgacagaactgttctaagcacttatttgcttaggatacttctttcattcctaagtggaatgaaggtaacagaacatatgtgctgcctgggccattgtcgtgaatatgagtgatcacactgccgtgtgtgagctgttaccatgcagaacgtagaccatgcagcaatagagtgatgcttacatgacctgtgtgtaagctaaagaaaaatcaggctttcacatcaacttagtttattcagaagtcttgctgaagcttgcaacctgttagtcttttcagagagtttctgttagactgctccaaggcagagtttcagcccgcagtttatagacaggtgatggcggctcttccagtgctcagaagttacaacagatgtgctcgaagttagattagagcaagatctcatcaaggtttgggcacaggagttcatgtggttatagatgatagaggcatagtcattaatcctgtcagacatgtacagaaagaggcaagggttagggtcattgaacttacctgattcaggcaagagactcgggaacctgtgctgtgtgctgctgatcatcttcagggcattcttctggagggctgcactcggtcagagtcaggggctttgtggaatcctgctggtaagggattttgtaaaattctgcaggcagcagaaaagcaaacgtggcttcttacatttgccattttgtctcacgtgtgcttgaagagcttaccgctgctccactttttagttctggcttctccttttggttgcttttctctcctccttgctctggggttaactcatcatgcttgcctgttgcagtttgtttttcaacatctaagaagttatggatgctaaggatatccagttacctcttgcagggttgacaggagtgtggtgtgatgccaccatgctctctttccatgcctgtggcagatggtactcagtgatcattgcactttccctgctgagacattcagccttaagaatcctcctcagcacagagtttcaggcagccgctgcccatccgttggatgtgagatgaaacctgttgatctaccacccgtcatctacctgggcttcttcgacttacaagtgatgacaactaagacccagaagggcaggtcacttcgctagagttgagtccaggttctctggttctccccagcagtttgtcctcttggttgctgtggcttaagaacctggtagtcaggcctttggaactgtgaaagtaagacgtgagagagggagacagagacccttttatgattaaggtacatgtgttgtgtgtgtgtgcatgccgattttgtaatatgtttggccttcttgttgccagctggaaattctaggtaatgaaggtattgtgctttttaatttaacagaagtagtacttggaagttactaccagccctagctcatgtttctgtgagcatttcctcacacacctagatcaatccttggaaggaccatctgtgcccaaggctggtgcggaggacagagagggagacatatttattttttgtagaatgtgtgtgtgttgcggggctggtccttcattggagaagaaaaataacagtaagtgggaggcccagcttcaggtaagataagcaagagtcagcttatcctttcattttgattctttgccccggcaaggacaaagcacctcctatttagaaaagcctttgccattcctgcggttggagggaggatgtgccaggctcttcgaaagattttcctttgcagtatgtttgcgggaggggaagcttcttcagaagggaaaagcccaacatacagcaataccacatttgcaaatgcttttatatcactatcgttcaacttagttgcttttattttatttcttttttgagataggatctctgtggcctagaccagagtgcaatggtgcaatctctgctcactgcagcctcgacccgtggtcccagctatttgggaggcaatcctcctgcctcagcctcccaagtagctgggaccaccggcatgcaccaccatgcctggctaatttttgtatgttttgtagagatggggttttgccatgttaccccggctgggctgaaaatcctgagctcaaatgatccgcctacccagtgctgggtgcctcccaaagtgctgggattacaggcatgagccaccacgcgccgtttacttttctcaagtagtcagttttcttcattttttaactgtaagagtaatgcatgcacatggtaaaaacccaaccaggagagcagaacaataagtatcatagatgtcccctgttcttccccacatctaggcctgttcctcgggtagtcagtgttagtggtcttgtatctacacatatgtgtatgtacatagatatgaaatagcagggcgtactgcctgtgttagttggctagggccaccataacaaagtcacactgactgggtggcttacccaacagaaattcagcttctcacttgtgaaggccagaagtccaagagcaaggtgtgtgcagggtcactttcttctgaggcctctctccttggcttgtacatggccaccgtgttgttgtgctgtccctgtgtgtgtgtcctcctcttcttagaagcagtcctgttggattagggaccaccccagtggtcgtatttaacttttaaatacctttttcgttgagacagagtctggctctgtcacccaggctggagtgcagtggcgcgatctcggctcactgcaacctctgccccccgggttcaagcgattctcgtgcctcagactcctcagaagctgggactgcaggcatgtgccaccatgcttggctaatttttgtatttttagtagagacggggtgttgccatgttggccaggttggccaggctggcctcgaactcctggcctcaagcaatctactcgctttgggagttgggattacatgcgtgatccaccgcgcctggtctaaccttaattacctttttaaaggccctatctgcaaatacagtcactttctgaggtactagggtttagtacttcaacatatgaattttgggggacacaatttagcccaacacacctgacgtattaacaaatatttcattgtataggtcgtaattcattttactagtccctgggtagctggaaaataaggctgtttctagtgtttgttatgaacagcctcatacctaaatctctgtgtctttttggaaatgtatctgtgagaggagtttctggaaggattgcaagcattgccctctgaagatgttgttggactcccttttgcgtgtgtgaatgttacttccttggaggaggagagtatgcagtatctacaaattaacacccttagtattctctgtgattcagtgcttgcgtgggaaattgagtatagcatgcaattgtgaacttgttcccatggaggagattgccagccactgtgcgtgaggagtgttgccactgtgacttcaccatacattattcagccaacatccatttactgagtcgtttgggggggcaggcactgttttgttcatttatttatttatatttttaaaaaataggcttaggtttttttttttttagagcagttttaggttcacagcacaattaagaggaagatacagagagttcccatatacctcccctccccacttgcacggcctcccccattatcagctcctcccaccagactggtacatttgttagaatcgatgaacctaccttgacacatcactaccacctaaagtccatggtttacattagcattccctcttggcgttgtatattctatatttatttgttttttatatgctgtaactttttcagtaaaagctttatgccctcttggagccaggggtaacgaaaccctggcacttctctccaagcttgtgaaagcaccagtagttccagccaggaattgatttttccagttttgaaagtgagtgacatgctcagtgtcttaaccctgtaggtggcaggggctggatgtgaacccattttattcaaaggtatgctcctccagaaacacgtgttcagtcagcagggctgtgagatttccctagatgctaacataaatgtttcttttacggatgctgttttgaatttccacctggtatatatatcaatgtgtagcttaagataatgtgctcgaaccttaattattagcatagtttactttgataaatcacttttgggctagtaagaaaggctagtccattctaatatttggaatgtgtgtgtataggtacacatacatatagacacatatatatgtacatatgtatatttgtaataccatagcactgtatagagtaagagtgaaaatgaaatttggaaaatcagatccatacaatggcatatgactttaatgacagaatagggttaaaccaatagggctttctttttacattttccacaatcatgtcccttctgttgctatttgtctgcctttagatgatcagttccaattaggctcacagtgatgtttgtatctgtttatttttccctctgtggagataatagtaagtttaaatgttgattcagctgtgggaatgttttattgtgggaggcattaactgtttccaaaatacttattttcccaaatagaataagtattttgttgatcacatttgaacttgaaatacagtgagaggttgctgggcaccatggcttacacctgtaatcccagcactttatgggaggccgagacggcggattacaaggtcaggagattgagaccatcctggctaacacagtgaaaccccatttctactaaaaatacaaaaaattagccaggcgtggtggcgggcgcctgtagtcccagctactcgggaggctgaggcaggagaatggtgtgaacccaggaggcggagcttgcagtgagccaagatcgtgccactgcactccagcctgggcgactgagtgagactccgtctaaaaaatatatatatatatatagtgagaagttatctaagaccacagggtaacagagagttagcaaccagccaggcatggtatcatggtgtcctgtgcttgtagtcccagctaaggctgaggcaggagcattacttgagcccaggagtttgaggccagtctgtgtaacacaatgaaactctgtctcttaaaaaaaaaaaaaaaaaaagcaatcagtgaaggaggcagttaggaaagggttcaggaggcaggacccagagaaaagccagctaaagcagtggggaggggacagttgtatgtgtatgtgtttaaaattggggcatgtgagtggaaagaggtcagtaaaatcagagattgagaacatcagtgaaggaattgtaaaggaaagtggcccataaaacacccacacatgcagtaatgttaggataccacttgtgtattctcttatctcagcccgagtagaatgtcttcttttacaaagcagtggcttagttttgtgagtcaagaagaatctggaggaagctggcttggaaaatcggacgtaagatggagagagttggttaggaaaaatttgtagtgatgaaacagtagagaatgacacagggctcaaacaatgacagtctcatgaagtagatgagataactagggaaatgactgtgattccaagatctgtcataccattatggtatgttgtcttacccatatacctgtgatcgtagctcattgtaagtgatgtttatggtgtagcattctaattgatgcttgttttgaagccttgcagagtctcaaacttccttccaaatcattatcaaaagattgaattgttgggctttaggtttatatagagtatagtgttaatacatacagattttattgtaatctgcagtttatggtaatttcttgtagcattgccctgttggcttaacagggactcctttctggtgccagttgtgtctgattaggttatccaagacaccatgtagtacttctgccacccccactttataaacgagaagtcttgaggttttttttttttttttttttgtgcaccaccacacccggctaatattttgttttttgttttgttttgttttgttttgttttgtatttagtagagacgaggtttcaccatgttggccaggatggtcatggtcttgatctcctgacctcacgatccgcctgccttggcctcctaaagtgctgggattacaggtgtgagccaccgtgcctggccaagtcttgagtttttaaaggataaataacttgcttgtagttcacagctagtaggtggcaaagccaggccacaaacccagccaagctttgagcctgagcttttaatcaccatcctctattaccttatggtttattaaagatcccaaagaaaagatgtgtatgctgttagtggtatagcaggagctctgtgctcctctgggcccacgtcctactcattaacccaaaaagcttaccatttgggacatgaaactctggtagaaatgcagtgtaaaaggcacccatttcttttgagcttcaagttacatactctcattatttcctacaagggtgtatggctgcaggcctttcccatcccagcaccctgggtgcttgtacattcatccttaggctcatggattttgacaggttccttttgaaaccgtctagggttgatggtcatgttgtccgaggtgttatccaagtccgttgtctcacgaccaagaaaagtaaggattaatatgaacacaagggtgaagttggagtgaacgaagaaagctctgtgcaatggaaaggaggacctgagtgagtcgctgtttttacagttgagtctgaaagcttttatgagaaactcccctcatctctgtagctgtttgcctaagttcccttatctgtgcagctgtctgtgtaactctccttatcagtgcagacacgggcatgtgttgggtaaacacaaagtgcagctcctcatttgtgtaactgtgttttaggtaagcctcccccagcacctccccactccctgtgcaagttcccacggagcccaccgtgtatgtgcctgagaaggagaggaaacttttccctgggagcctgctaatcacacaaagaacaaaaggcttctatgctgggccctgctttcttatcagtgcagctgcagttttgtttttccccaggcaactcttatttgtatgtgtagctgtgatttttcagtctgtttctctgaggactagccttaactgtctgcctaactgatttttccttttcttctccctcactttcttgggcccaactttttgtttttcatgttcttcccactttgtttactagttcttggcttcttctcttgctcttagctgattgtagaaatctttttgtctgagagtcacgattataatacttcagatgaactgtgccttttctgtgtaataattgggcatctcccaaaccattgatggttgtcattaaagatagcaccagaacaattccgatgaaagctttgttcacacaccgaactgttcctgcatgtcctatggtcaaggtacctgggaagaatgttcatcttgtagcttggaaggtcgacctacagaagacctgggtgaatacgttggtaaagtggtgtgactcagtacaggacaccaactgggcatcccacaatttaattcaattctgacactaactacctagagttcgcacagacctcacaggttaagggctgggttccacaagacttttctcatttcagatgccaattgcaaatctaggccttccatacttctgactgaccagctatgaatcaggggttcccagcatcccctctttaggttcaataatgggctagaatggatcacagaactcaccaaaactctttactggcgattaccagtttattataaaggagacaaatgaacagccagatgaagaggtacacagggcactgtccggaagggtcccgagcgccagagcatcgttcccttggagtttgggtgcaccaccctccaggcacatggatgcgttcaccaaactggaagctctgaatcccattgattagggtttttatggaggcactattatgtacatgcggctgattaaatcatgggctattggtaattagctcagtcttcagtccctgcccaggtgtgtgctcctgaaagttccgaccctctaaaccacatggttggttccactgatagccagccttccatcctgaagctatctagggacccaggaagagttgcctcattagtacaagctctggtatgactgaaaagagcattagtaacgaaatactctcctgttaacctctgtcactcaggaaattccagaagttttagaagcccttgcaccagaccaaatttttgtatatatatatgtagagtaatggcaaaaaccacaattacttttgcaccaacctaatatgattgttttcttttttcctggtcatgtttttcatggagatagcctcccaagtagctgggactacaggtttgtgccaccatgcctggctaattaaagaaaaaattttttgtaagagatggggtcttgctgtgttgcccaggctgatctcaaactcctgggttcaagcaatcttcttaccttgatctcccacagctctgggattaaaggtgtgaatcactgcactgggccttattaaaaatatatatatgtgtgtgtgtgtgtatatgtgcatgtgtgtatgtatatatgtatatataaaatatacattagatatagactgtctcaatatatataaatatatatacacatatatatatatatgtgtatatatatttatttagagacaggttcttgctgtgttgaccaggctaaacttgaactctggtctcaagcgatcctagtctcaagtgatcctccagccccccgagtagcagggactccagatgtgtaccacagtgcctggccatgtttcttattctatcacagtatcatgctctaagcagatgccttctgttccttttctagctggcctgctgctgtgggtctgcaggctgctctctctgctgtgattgctgccccaggattcggcagtccctcagcacccgcttcatgtacgccctctacttcattctggtcgtcgtcctctgctgcatcatgatgtcaacaaccgtggctcacaagatgaaagagcacgtaagtttgtccgtgttcagctcgtcctatttccgatgtttgatgagggtgtgtgggaaaaacatgatttagaagatggggtccatgtacccccatgtgttttggggtatacctggtttccttgaaccttcctgaagcctgctctatgctttccaggatccaatgccttctggctaaacaggaaaaccaatcaacagcttgatctttagtagtagtgtagattctatctgatgcttttggtggagaattcttgttttaatttttaaattttaaaacatttgtgtagattaatggggtacaagtgcaattttgctatgttgatatattaccttgtggtgaagtcagggccttcggtgcatccatcccgggaataacacacgttgtacccaccaggcaacctctcatcatccacccccttcccagccccacagcccctgagtctccattgtctatcattgtccatcattggacacatcatggacacatcattgtccatcacaatcgtctgtttatgtcagacgattgtgtattttatcttagcattgtttatagctgttcctgatgaaatatactatcttttcttgtacccttctgtccttttcccttgtcataggatggctgccaggatttctttcttcttttttttcgagacagagttttgctcttgttacccaggctagagtgcaatggcatgatctcggctcactgcaacctccacctcccaggttcaagcgattcttctgcctcagcctccctagtagctgggattacaggtgccccccaccacggccagctaatttttgtatttttagtagaggcagggtttcaccatgttggccaggctggtcttgaactcctgacctcaagtgatctacccgccttggcctcccaaaagtgctgggattacaggcgtgagccactgtgcctggccgcctgccaggatttcaaatagcagctgaaacacttaatttggcctacataggaagtataataaagctgatattctcacaaataatggagaatgggctatggggcatttcccacctttctggacaggttacttgtagggtgagtggtgtcttcatgggtgaggggtggatttttggccgttctttggtcagcgtatacagaagtaggcctggtgtgtgatgctgatggagatacatgtgggacctctttttcttgaatttccttttttcccccatagtagtcctcctggatcacaggggactgtggtggggattttgagagagcccaagaaataacactttgtctcctaggttctaagcaaattgacaaaaaagactaagatgtcagcaggttgccaaacatcacctttattcctcataaaactgatgtgaggctctgtgggctcatatcttcagggaagcaggcttttactgaacccccaaatgactcagactcacccagcagggcaccatcagtgcccgggaagggcagacttctttgcaagggcgcagtttgccaggaagagagagcagcaggcgtgttcccttggggcagctcttatcctagagatagagggagaagaaagccttgctatccaaatgccatttccccttacaaaccgaccactccgtactgcatcttcccagctgaacaagtgaggaggtggagggaagtccggagcaggctctgatggagctgcccacagtagggatgacattgcccggggcaacacctgagcaaacgtttgccccaacctgtgctgaaactagggctattttattttttttattgattgatgatttttttgtgggggggtggtggatggagtcttgctctgttgcccaggctggagtgcaatggcgcgatctcagcccactgcagcctccgcctcccaggttcaagcaattctcccacctcagcctcccgagtggttgggattacaggcgcgtgccaccatgcctggctaaattttcgtatctttctttagtagagatagggtttcaccatgttggctgggctggtctggaactcctgacctcaagtgatctgcctgcctcagcctcccaaagtgctgggattacatgctgagccaccatgcctggcctgaaactagggctattttaaatacactcaagtatttcaaaacaaccattttcttaacagcactttgtatattcttattcattaaaataggccttctgaagctttctgttgcatagtgcttttataattctggttgtatggtcttggatatggtggatactgcagtgaaatttgggttcccctctgactgcttgaaacattggctgtttcctcagtaagacactgtagtgctagccgtggggtgttcacacttgcgagaaatggagcttataattcagaagagaagtgatgaagtcttttttttcttttcttttctttttttttttttgagatggagtcttgctctgtcgcccaggctggagtgcagtggtgcgatctcggctcactgcaagctctgcctcctgggttcacaccattctcctgcctcagcctcccgagtagctgggactacaggcgccggccaccacgcctggctaattttttttttttttttgtattttttagtagagacggggtttcaccatgttagccaggatggtctcgatctcctgacctcgtgatccgcctgcctcagcctcccaaagtgctgggattacaggcgtgagccactgtgcccagccaaagttataaagtcttctaaggcctaaaacaaggcagaaattacgagtctcgctctgttgcccaagctagagtgcagtggcacaatcatggctctctgcagccttgacctcccaggctcaatcgatcctcctgcctcagccttctgagtagttgggactacaggcgtgagccaccatgctggctagtttttctatctgaaagcgtagattttaactcttattctgagcgtccacttaatctcccatgtactacttgtgtttttttaagtaatacagtaaattacttaaatttactctttgtaaattcaacaagcttgaatttctaaatccattaaggtggcttgatgatccactgtggtactgtggtgggaactctgctgtgcactggttgtagtgtgatccctgctcttaataagttgctattctttaatagaattaagccctgcatccaaaaaacaaaatctattactaaacaaatagatagtatcccacagtggtgaatttattgagacgttagagggagagataatttgggagccattggtatgtgttttaggacgtgaatttcataatgataatattcacacctgattaccatccaagtaacctgccccatgaagcagttctagcaattccagtcagtatttatgctttctgactgttaacggatcatttgagaaacagaagatgttccactggtgttgctaggaaaggcttcgtgaaataagtgacttgtatgagtaataataactatttcaatagctaattattgagtgataccatgtgtcaggttttattctgagcactttccctgtattttcttacttcatcagcactgtactcacctgaacagtaggtactagcattacccctgccctacagatggggaaactgaaacatcgagccatttaagtacctcacccaaggtctccagctattaaatggtggggttaggatttgaatctggtctgaatatgttcttagctacgaggctgtgtgactagagaggagggagaggcaggtggagaaggaccaagaggtgaggcgaggtgaaatgaccacatcttgcaggaattgtagtgccaaggtgaagtgtttgaatgtggtctgtggcaagtgggaagccattacagattctagagcaggaggctatatcatggaaacagagggagatattttgggaggtgagcctagaggtagtggtggcagtgggcacagggtgacttacagtcagagaacagagagagggaggaagagagggaaggcaaccctgatgtccctcacagaggctcttgtaaatgtttctatgcctgtcccctgaatgtacctatttacaaatggtttggctgggtgtcctgcgtagggaatgagatccctgtgggtgaaaccaatccttttccagctttagggcctcacaagggagctggccatctggccacaaagtcagcttgtttcgtggcctacagaagagaggctgacctcatcctcagggggtgcttgcgggcgggtgttgaaaggtccccttgtagggacgcacactgggctcctgctggagtccttaccccctctttgttggccgtggaagtgcctgagactgtgactggaagaggagaaagaactgcatgcttgtaacggcccggatgggagtgtgtaagtgcctcctacccagcgttctgccagagtcgcgtgggtctttggtatgtgggttaggagcgcaagggcagctcccttgtcagttatttccagtttttgccttggttgcagaatgtggcctgtgtttaagtttgagtaagaggggactgcaagggatgctgggccagactttgtcctgcttcttttctttagggaaactcctctttcccaggagaactttggctcagagaaagcttgactgtgctggttgaataaggcatgattctgtcttctcttggagcatttccccatctcaaaacataagggctatttattttgcaggtcattcttgttattaactgtataatttaagcaggtacacactcatgagatttgatacctgggggattaaaaatccattttagaggccgggtgtggtggctcatgcctgtaatgtcagcactttgggaggctgaggcgggcggatcacaaggtcaagagatccagaccatcctaaccaacatggtgaaaccccatctctactaaaaatacaaaaattagctgggtgtggtggcgtgcacctgtagtcccagctactcaggaggttgaggcaggagaatcgcttgaatccaggaggtggaggctgcagtgagccgagatcccggcactgcactccagcctggcgacagagtgacactctgtctcaaaaagaaagtccattttagaatgtagaatgcaaagggaacaaaagtgggcaagaaagtaaagcctcccaacccaaacgctaagtcaaggtgtaacgtctgtgtttgaggaagattcagatttaggcaccctgggaagccacatgggtgtttggggagggaggagaaaggaaagtctttatttcctagggagtaggggccactaaaacctgtactgaagaaggaaggatgggtgacctgtgcagcccccactttctcccctgagagctcaatgtgccaggccaatgtaggaagagccatagatattcccagcctgaaacatgttagatctgtttccttcattccacattacactctccactccctccccatcttcccctcaagctccccagccctaggcagccactaatctattttgtctctgtggatttgcctattctagacatttcgtataaatggaatcatacaatatatagccctctgtgtctggtccgttctctctctctctctctcacagatggagtcttgctctgtctctccggctgaaacgcagtggcacgatcttctgcttcagcctcccgagtagctgggattacaggtgcctgccaccatgcccggctaatttttataattttagtagagacagggtttcaccatgttggccaggctggtctcgaactcctgacctcaggtgatttgcctgcctaggcctcccaaagtgctgggattacaggcgtgagccaccgcacctggcccacttagcatgtttttaaggttcacactcaggttgtagcatatgtacttcattcctttaagtggctagataaatattctgttgtatgaatataacattttattttacttttatttatttatttcttttgagatggagtttcactctgttacccaggctagagtgcagtggtgtgatctcggctcacagcaacccccgcctcccaggttcaagcgattctccttcctcggcctcctgagtagctgggattacaggcgcgcactaccaggcccggttaattttttatatttttggtagagacagggtttcaccatgttggctagactggcctcgaattcctgacctcaagtgatctgcccgccttggcctccaaaagtgttgcgactgtaaatatacctgtaacatattttatgtatccatttgtcagttgatggacatttggattgtttgtaccttttggctattataaattatgctcctgtgaacattcgtgtactgatttttgtatggacatatgttttcatttctcttgggtttatatctagaagcagaattgctggattgtgtagtaattttaagctcttgaggaaccgccatattattttccaaagttgctacatcattttccattcccaccagtaatgtgggatattcaggatgaagtcatgtattaaggttcacatttctccacaccctcaccaacacttaatggtacatcttttttttattttagtcgctatagtgtgtgtgaggtggtcatctcctctttgcctgtgcctctaacactgccctctgcccttcccgttcgcttgctttcccctggggcagcttgttcatttctggctttgatcatccccatatgtgcatctgcttgtaaaaacacccttcactcaggacagtgctgaggacactggtagattctttcttcctgcatccccgtttttctagatcttgtgcatacttttccccagacaggtcataaaagtctcaggcttccactctgcattccagtcagtcacggtgatttggccatgccaccctccctggtgttgcatattacacttaccttgtttgaacttgagtagttcccagatgttcccagctgccctcagacttctttctccagataacttagcccgttagttaggctgagctgaaggtgctgtttgctacatttctcccagatgataccctatttctaaattctggggtcaccacagtgtagtgactgtaggtgaatacagtggctactttacttaaaaacaacttggatttccaaaggctattcataagcacatcttttagtctgtttacagtgacatgttaaaatacttctgtggttcttggagttgacagagttctttgatccgttatgtttgaaactctgaaactggggagatgagctactttatttcctatttttaaactgaagaattaaaataaatatgaagccataatattaaatattccttgtgggaagcccttcttgtactggttccagggatccaaaaatgcctgaaacaaggccccttaaaggagcgagttaaagagatgagtggaaaaaggctgcagctcgtatgtatagcaagtgttctgccttgagaagagacagcaaatacgtgtggtgttaagtgttctacagagaaaacaatgatctttttaggatataatttatttttaaaatttgtataaatttatgggggtacaagtgtaattttgttacattgatatattgcttaggatataatttgaatacattgttagaattttttttttttttttgcgacagagtttcactcttgttgcccaggctggagtgcaatggcatgatcttggctcaccacaacctctgcctcccaggttcaagggattctcctgcctcagcctcccgagtagctgggattacaggcatgcaccatcacactcggctaattttgtatttttagtagagaaagggtttctcaatgttggtcaggctggtctcgaactcctgacctcaggtgatccacctgcctccgcctcccaaagtgctgggattacaggtgtgagccaccacacctggcccattgttaagaatttttaaaagcagaaaagtcctaagtggtcatcttaacaaacctgtcgtttgacaggtgaggagctgtggcccaggaagtgaagtggcttgtcagaactgagacaccaggtatatctgggattagaacccagggctgctggtcgcctggccagtgcatctcctgtttgtgcaactaggtttgcttgttggtcagatattcacagaagtcacagttaaatgccttttatcaagcatatccttcctccgctttctagactttcttctgggcccagtggtaagaagtattacttttggaaatagcgctgcctggggccctcagcagcgatcttagcttagttacatttcccatctgcctgcttcctgttgtgatgaccaaaagctgagctcaagggatgactgttattctgaagtagaaaacagaggtagccacaaaactagtatttatttattcagtggctttacatgtaaaatagaacttgttttcaggttgtgtttggtataaccatctttttaaaacaaacatcatcagtgaaaaatattccgctttgatccaaaatactgtgcagtttgtcccaatgtaaaatgacaggtcttcatgctgaagctggagagtctggctcttgattttcctttgatatttactggttgaatgttcagagcacactgtacctgagacctgcatcaggggctggcataggcacattgaagcctcaagtagaactctctccattctccgcttatatgcttttgtgtcagaacaagtgtcaaattaacaataacaagaaaatattgctgacccagttctttgattctggaatgcttttttaaaatccagctgagatggagtgcttttcaaaagttctctttctgcgtagcaactgagttcatggtactgttgtaccttatgtgtcaagttatcaaggaggaagtttttgagattaaaagtgggttgggaccatcgaacctcaagcccattgtagaactgagggaaaattctcaccatgaccttttagaattttcctctggggagctggctttgaggttttgcctcttaaatcctctgagttccctcccctccaagttaggatgactctggagacatatgtttccaaacggttttatcttttggtctaaatttcatccggagataacatgtgagagaaagcaaggagtccctgtaccctcctatgcctcagctgtcattgctgggccttatccttccccatacaagtggatgtcgggaagtagtggtgggaaatcgttttgtactggaggcagcaatttgaactaatggatatcctgctgagagtctttttttgagcctgaaccaaggacaaagaggtttgatcctggtccagtaataatgagcttgccaggaggcaggaaattggaaacaatacatactgtccttggtctgtgaggatccattacctgcacgtttgcgggagcaccaggtgtcagctggatctcttttaggattggtctggctatggacgagagagaatgataagatgtgagaatgaaagttttcctaacacgtttttttctgtagtcatctaaagcgtctgttaagcaactgtccacagacagggcctcggagtagcctgcagataaatagaacagacaaaagctttggaaatgagcattgtcagccatcataaacatggggctggagagaacagagaaatggcacaacgaagaatggaagaaaaagtagcctcagagcgatgggaacaggaaacaatgcatagatattgtgaatggctgaatcttgatacttactctgcatagaaatttaataggatgattctgtgacttgattaaactgtaatccgagctcattcttcaaaagtttaaaaaattgcctagctgtcattctttcagatgcaagtggcgagcactctgaaaggtgctggggatttcagagacactgagtaacacacagttattgtccccatagagctggccctcaggtaggggaaaagagagcagtttggcaagtgtgtctggaaggagcctgtgatgctagactgtgtatgtctgaaagctaaaaatatgtgaactccattagtgaatattggacagtggtgttggctcagatgtgactcggctgaccttcggagtcacgtggtaactcaggaatgctctctccccattctagagacagagctgaggtgcctgggaggtttataaaatggaatgaagtgtttttgcctcctcatcagggctgagcataatcataaggggttgggtattctggtggtgtggttttaaaatttcagcgagacagtctctgcagtcttcaaatagatctaaaattatctttcgacatgctggctttcatcagtgtggggtttatttttggttccatggggtgtgtttgtgtgacagatgtgaggacgttttctgttcgagctattgatggcttctgagccgcagagatgagcgctggaagctcatagacacattctctctccattccttcccaccccatctgaaaaactttctgtgggtggataaattaaggtactttattttctgctaaaaaaaaaaaaatgacatatgggagatacacagtttgattcacttaaggcccaagttccatttgaggacagccctgaggaagggaagagtctcatgggagaaggcaggagcggagggttgggacagctggaccgcagcccaaaggagctgctcttttggctcttgatttgtagagtaagttatcaccagttgtcacttgcttttgaaatgtgcatttgtacttaggcagttaacagttagccacaactcctcatctattcttcctagtagcgcaggggtggggcagacttttcttacaaagagccagctagtacacactggaggccctgtggtctctgtagcagctctcgcctttgtagtgcaaaagcagccaaaacaatatgccagccaatggcatggccagccaaccagtgtggctatgttccaataaaactaggaggctagctggatttgacccactggctgtcgttggctgactcctgtgttagaccctccatggtcttatatgcgttatgtgcagttattctcccatctctctcaaaagggaaacgtcagtggcctgaacattgtgctcagagtaccagagttcttgcttaagttgcaggtaactgactaggctgtatgaaccacatagtgggtagactaggtaagaataatgtggcaataaattagtatgacatgtttaatagtaattatgtctatatggcattttggaataaatggcaaattgtttacaagttaaaaaaaaaaaagtctttttttttttctttctttttttttttttagagacagggccttgccctgttgcccaggctggaatgtggtggcacgatcatggctcactgcaggcttaacctctggggctcaagtgattccctgcttcagcctgctgagtaaccgggaccatagatgtgcaccacgatgcctggctaatttttctttttttttttcttttttttttttttttgtagagatggagtctccctatgttgcccaggctggtctcaaactcctaggctcaaagcaacgatcctcctgcctcagccttccaaagtgctgggattataggtgtaagccactgtgcccagccagtcatctttttatatattctgtcaaaggacgaaattacaaatttagttggaaagttgaattggattttatttgtgattctagaatgtgaagtagaacgactgttccagttagctgagcagaggagggtgtctttataggcagaaaaggcttgaaaaaaagcagaaacagaacaaaaggttaaaacaggatttccttattaggcagactcacattgactagaatctttcagtggtttttttttttggtttttgtttttaaagaaaactggcccccaaattcagtggcacttagtacaagtggcttcattttggttcggtctggtctgctggggcctagtgcaggagtcaaaaacaatggcctctcctaaactttaacaatccaaaccaagcattttggtgatccaggaagaagtggggttggagaaaatgagggtctgggcaccctagttccccagctgctgggcaccatcattcaattccaggtctgatataagaaagatgctggggccggaaacttaaatgtctgccatgtactggttcccatcactagaactggggaacaggtaatggggctctcaaatcttgaggttataggtttggtgtagagtcctatcttttggggaacattaggtcctaatgtcctgcctaaggcaaacatcatgactagtccgaattaaccatgaaaatacttcaaatatccatcaagtagagcatagttttgtgcatacagcatttcactagtagaacgttagctctttttagcatgaacttttaaactgttttattcacagctcgtatccccctagtttagagcaatacctgcacatagtagttgggaatgagtgcgtggatgatcaaactctaggctgtaatacatgtgtatgtcatgtaacatatagtacggaatgaagattatacatgcaaactctaaattcactggatttttacaaattatatgctcatgtctgtaatcccagcactttggcagaccaagatgggaggatcacttgagccaagagttcgagaccagcctgggcaacatgacgaaaccccgtctctacaaaaaatacaaaaattagtcaggtgtcatggtgtgcacctgtagtcctagctgctccaggaggctgagatgggaggattgcttgagccagggaggtggaggttgcagtgagccgagattgtgccattgcactctagcctgggtgactgagtgagaccctgtctcaaaaaaaaaaaaaaaaaaaaagtacgggagacagttatgtaaatagttgaacttgcaaataatgtattaccactgcgttcaggtccacacatttaagaagaaagcaagctaattttggctgagtgaggtggctcccacctataatcccagcagtgtggggatgctgcagtgggaggatcttgtgaggccaggcaatttgagaccagcctgtgcaacatagttaaaaccctgtctctacaaaaagtaaaaaagtagcggatgtgttggcatgcacctctagtcccagcttctgggaaggctgaagtgggaggatggcttgcgtctaggagtttgaggctgcagtgagctatgattgtgccactgcactccagcctgagggacagagcaagaccccttctctattaaaagaaaagaaaaaaaaagaaactagcagatttgaggctcacttagactataagcatgtgttttctctaaatggttagaatagaaagacctgcatgtttcagcatttagtcctctctttatagaaatttcacatttctatgttcaagagatatctttccatcagccgtgttcacctcagggcagcacagtgtcttctgttagaccctgtattctgtgtggggccatagccgtattttctagccgaaacgaaagttcagacctccgtagctgtggttttaagttgtcttgagttagaaatagatttgtgtctttggctcagagggtcctattcactctcttcccggctttggttgtaggggcattgcttacaaaggccctcaggaatctggaagattgaccatgttgaccttgccggggcagcacaggagtaccctggctgagagatgggtgtgtcaccgcaggctctgcctctgcttgccggcacctccactcctcctctcttctgctctattacccctaattccagagtttccaaaacccttcttatggagagtttggcagtatccgttcaaattttaaatgtactaactttatgacttctgtcataaagctgactttagcttctgtccttctcaacactttacatgtgaacagagagatacacataataaggatcgatatcccacttgtacacttatgttatgaatagctgagacaaaaatcaagaaaaaaacgtaaatgccctatcagccaggataacaaactaaattagagtcaatcagattgtagaattctaaatttttatctatttttctgagacaggttttgctgtgttggctaggctgcagtgcagtggcgcgatcatggctcactgcagcctcaaccttctgggctgaagtgatcctcccacctcagtctcctaaactcttgggctcaagagatgctcctaccccagcctcctgagtaactgggactacaggcgtgcaccactatgcctggccaatttttttactttttgtagagacggggtctctcactgtgctgcccaggctggtcttgaactccggggctcaagtgatcctcctgccttggcctctcaaagtgctcagattacaggtgtgggccactgggcccagcctagaattctatgtagtatgtaagaagatgcaaatagatttatctgttaaacatacagcaacctccaagacataatgaatgtagaataatggcacagcaaagggtctagaaagatccactcacacctggggacagtggcacctctagggaagcaatcaagttagaattgaggcattgatgggcaaggacactgggttatttgtatttttattgtaatttacacattttggcagtaaaatatataattgttttgcttatataagtgcaaataaaattgagaataatcctttgcagttagattttttttttttttttttttttgagacggagtcttgctctgtcgcccaggctagagtgcagtggtgggatctcagcgcactgcaaaccccgcctcccgggttcaagcgattctcctgtctcagcctcccgagtagctgggattacaggtgcccgccatgcacctggctaatttttgtattttttagcagagacggggtttcaccatcttggccaggctggtctcgaactcctgacctcatgatccacctgcctcggcctcccaaagtgctaggattatgggcgtgagccaccgcacccagccttctgccttcagttttacctaattctctcaatggagattgaaatgagttgaatcctgttctgcatctgtggaggagcccttcttcccatagtaattaattagtcagtcttctgggagttgtctcctttggagcttattgtataacggtttgcttagagttgctttctggctgcttaatcctatctgtgactgtttgattctgacaaaatattcatggtggaggaggagctgtgaactcgcattctcagtctttgcatgctttttgagattaattttcattcatcttttggcttttaataatgatacaatgtagatttttctattaaaaatgctcagataacccaaagaaaagagaagccagtactggttgttgttattgtttattaaatagccccagatcccccaaagggcctcaaaggcaatcacttactgagaaatgagctttggttgccaagaggctgtgtaaggaaagagggaagctgattttagtgtttcccatttcatggctgttgtccactgaccaataacaggaagtcatcagtgtggtggaccctggaagtacttcatggagaaaaacaaactatcctggaaagtttgaagatgagtggaatatcagaaaagggagaggcagactgggagacattctaggttctgaaatgcattttcaagtgagggatattaaacagaacttgcaaatctagttcttctagtttttgtgaacctaatttatccctcatgtggagctgcccaaagctttctttgaaatttgatattaatataatgaaatgtaagaataattagctttgctaatattgcattttcttttttcttttttttgagatggagttttgctttgtcacccaagctggagtgcagtggcgtgatctcagctcactgcaacctcttcttcctgggttcaagctattctcctgcctcagcctcctgagtacttgggactacagacgtgtgccaccacgcctggctaatttttgtatttttaggtatttttggtagagatggaatttcaccatgttagccaggctggtctcgaactcctgacctcaggcagtccgcccgccttggcctccccaaatgctgggattacatacgtgagccaccgcgcctggcctaatattgcattttctaatctcaagtaacacgattacacaactacaactttcacctacttcctctccatttcttaagaagccactcccaaaacttatacatgttttctatgtttgtagcatctgggcccctggccaattagacctgtaggtcttcctgtagcttttttgttgtttatttgcctgggattgaagttgttttagggacatagctagcatctctcctgtgtaaacaaaattacgtgaattttcttctcccttgcatcttgttgagtttattacttgttttcatgttttggaaatgtttttccaaatttgtgagttcagaatgctttcttctggatggtggctaggtctctgaaggacaagtagtgagtgctattttttggacctcagttctaatactaaatgtaccaaggaaagattcaccttactgacaggtcgggcgcggtggctcacgcctgtaatcccaacacttggggatccttctaggagtcgacctgacaagcatgcagcttgcactgccgtttgttgcgtgccgtgccgccgnnnnnnnnnnnnnnnnnnnnnnnnnnnnnnnnnnnnnnnnnnnnnnnnnnnnnnnnnnnnnnnnnnnnnnnnnnnnnnnnnnnnnnnnnnnnnnnnnnnnnnnnnnnnnnnnnnnnnnnnnnnnnnnnnnnnnnnnnnnnnnnnnnnnnnnnnnnnnnnnnnnnnnnnnnnnnnnnnnnnnnnnnnnnnnnnnnnnnnnnnnnnnnnnnnnnnnnnnnnnnnnnnnnnnnnnnnnnnnnnnnnnnnnnnnnnnnnnnnnnnnnnnnnnnnnnnnnnnnnnnnnnnnnnnnnnnnnnnnnnnnnnnnnnnnnnnnnnnnnnnnnnnnnnnnnnnnnnnnnnnnnnnnnnnnnnnnnnnnnnnnnnnnnnnnnnnnnnnnnnnnnnnnnnnnnnnnnnnnnnnnnnnnnnnnnnnnnnnnnnnnnnnnnnnnnnnnnnnnnnnnnnnnnnnnnnnnnnnnnnnnnnnnnnnnnnnnnnnnnnnnnnnnnnnnnnnnnnnnnnnnnnnnnnnnnnnnnnnnnnnnnnnnnnnnnnnnnnnnnnnnnnnnnnnnnnnnnnnnnnnnnnnnnnnnnnnnnnnnnnnnnnnnnnnnnnnnnnnnnnnnnnnnnnnnnnnnnnnnnnnnnnnnnnnnnnnnnnnnnnnnnnnnnnnnnnnnnnnnnnnnnnnnnnnnnnnnnnnnnnnnnnnnnnnnnnnnnnnnnnnnnnnnnnnnnnnnnnnnnnnnnnnnnnnnnnnnnnnnnnnnnnnnnnnnnnnnnnnnnnnnnnnnnnnnnnnnnnnnnnnnnnnnnnnnnnnnnnnnnnnnnnnnnnnnnnnnnnnnnnnnnnnnnnnnnnnnnnnnnnnnnnnnnnnnnnnnnnnnnnnnnnnnnnnnnnnnnnnnnnnnnnnnnnnnnnnnnnnnnnnnnnnnnnnnnnnnnnnnnnnnnnnnnnnnnnnnnnnnnnnnnnnnnnnnnnnnnnnnnnnnnnnnnnnnnnnnnnnnnnnnnnnnnnnnnnnnnnnnnnnnnnnnnnnnnnnnnnnnnnnnnnnnnnnnnnnnnnnnnnnnnnnnnnnnnnnnnnnnnnnnnnnnnnnnnnnnnnnnnnnnnnnnnnnnnnnnnnnnnnnnnnnnnnnnnnnnnnnnnnnnnnnnnnnnnnnnnnnnnnnnnnnnnnnnnnnnnnnnnnnnnnnnnnnnnnnnnnnnnnnnnnnnnnnnnnnnnnnnnnnnnnnnnnnnnnnnnnnnnnnnnnnnnnnnnnnnnnnnnnnnnnnnnnnnnnnnnnnnnnnnnnnnnnnnnnnnnnnnnnnnnnnnnnnnnnnnnnnnnnnnnnnnnnnnnnnnnnnnnnnnnnnnnnnnnnnnnnnnnnnnnnnnnnnnnnnnnnnnnnnnnnnnnnnnnnnnnnnnnnnnnnnnnnnnnnnnnnnnnnnnnnnnnnnnnnnnnnnnnnnnnnnnnnnnnnnnnnnnnnnnnnnnnnnnnnnnnnnnnnnnnnnnnnnnnnnnnnnnnnnnnnnnnnnnnnnnnnnnnnnnnnnnnnnnnnnnnnnnnnnnnnnnnnnnnnnnnnnnnnnnnnnnnnnnnnnnnnnnnnnnnnnnnnnnnnnnnnnnnnnnnnnnnnnnnnnnnnnnnnnnnnnnnnnnnnnnnnnnnnnnnnnnnnnnnnnnnnnnnnnnnnnnnnnnnnnnnnnnnnnnnnnnnnnnnnnnnnnnnnnnnnnnnnnnnnnnnnnnnnnnnnnnnnnnnnnnnnnnnnnnnnnnnnnnnnnnnnnnnnnnnnnnnnnnnnnnnnnnnnnnnnnnnnnnnnnnnnnnnnnnnnnnnnnnnnnnnnnnnnnnnnnnnnnnnnnnnnnnnnnnnnnnnnnnnnnnnnnnnnnnnnnnnnnnnnnnnnnnnnnnnnnnnnnnnnnnnnnnnnnnnnnnnnnnnnnnnnnnnnnnnnnnnnnnnnnnnnnnnnnnnnnnnnnnnnnnnnnnnnnnnnnnnnnnnnnnnnnnnnnnnnnnnnnnnnnnnnnnnnnnnnnnnnnnnnnnnnnnnnnnnnnnnnnnnnnnnnnnnnnnnnnnnnnnnnnnnnnnnnnnnnnnnnnnnnnnnnnnnnnnnnnnnnnnnnnnnnnnnnnnnnnnnnnnnnnnnnnnnnnnnnnnnnnnnnnnnnnnnnnnnnnnnnnnnnnnnnnnnnnnnnnnnnnnnnnnnnnnnnnnnnnnnnnnnnnnnnnnnnnnnnnnnnnnnnnnnnnnnnnnnnnnnnnnnnnnnnnnnnnnnnnnnnnnnnnnnnnnnnnnnnnnnnnnnnnnnnnnnnnnnnnnnnnnnnnnnnnnnnnnnnnnnnnnnnnnnnnnnnnnnnnnnnnnnnnnnnnnnnnnnnnnnnnnnnnnnnnnnnnnnnnnnnnnnnnnnnnnnnnnnnnnnnnnnnnnnnnnnnnnnnnnnnnnnnnnnnnnnnnnnnnnnnnnnnnnnnnnnnnnnnnnnnnnnnnnnnnnnnnnnnnnnnnnnnnnnnnnnnnnnnnnnnnnnnnnnnnnnnnnnnnnnnnnnnnnnnnnnnnnnnnnnnnnnnnnnnnnnnnnnnnnnnnnnnnnnnnnnnnnnnnnnnnnnnnnnnnnnnnnnnnnnnnnnnnnnnnnnnnnnnnnnnnnnnnnnnnnnnnnnnnnnnnnnnnnnnnnnnnnnnnnnnnnnnnnnnnnnnnnnnnnnnnnnnnnnnnnnnnnnnnnnnnnnnnnnnnnnnnnnnnnnnnnnnnnnnnnnnnnnnnnnnnnnnnnnnnnnnnnnnnnnnnnnnnnnnnnnnnnnnnnnnnnnnnnnnnnnnnnnnnnnnnnnnnnnnnnnnnnnnnnnnnnnnnnnnnnnnnnnnnnnnnnnnnnnnnnnnnnnnnnnnnnnnnnnnnnnnnnnnnnnnnnnnnnnnnnnnnnnnnnnnnnnnnnnnnnnnnnnnnnnnnnnnnnnnnnnnnnnnnnnnnnnnnnnnnnnnnnnnnnnnnnnnnnnnnnnnnnnnnnnnnnnnnnnnnnnnnnnnnnnnnnnnnnnnnnnnnnnnnnnnnnnnnnnnnnnnnnnnnnnnnnnnnnnnnnnnnnnnnnnnnnnnnnnnnnnnnnnnnnnnnnnnnnnnnnnnnnnnnnnnnnnnnnnnnnnnnnnnnnnnnnnnnnnnnnnnnnnnnnnnnnnnnnnnnnnnnnnnnnnnnnnnnnnnnnnnnnnnnnnnnnnnnnnnnnnnnnnnnnnnnnnnnnnnnnnnnnnnnnnnnnnnnnnnnnnnnnnnnnnnnnnnnnnnnnnnnnnnnnnnnnnnnnnnnnnnnnnnnnnnnnnnnnnnnnnnnnnnnnnnnnnnnnnnnnnnnnnnnnnnnnnnnnnnnnnnnnnnnnnnnnnnnnnnnnnnnnnnnnnnnnnnnnnnnnnnnnnnnnnnnnnnnnnnnnnnnnnnnnnnnnnnnnnnnnnnnnnnnnnnnnnnnnnnnnnnnnnnnnnnnnnnnnnnnnnnnnnnnnnnnnnnnnnnnnnnnnnnncagaactttgggaggctgaagtgggcggatcatttgaggccaggagttcaagaccagcctggccaacatggtgaaaccccatctctactaaaaatacaaaaattagccaggcgtggtggcaggcgcctgtaatcccagctactctggaggctgaggcaggagaatcacttgaacctgggaggcagaggttgcagtgaggcgagattgcgccactgcactccagcctgggcaacagaggtctcaattaaaaaaaagcggagggggggggggcggtcagatgatagaagcttatggcatgttgagctacagagaggaataggggcttggggcctctgggagttgctggcaacacgtaatgggagagtgaggggaagaaatgtatggtgaataaacgtctgatacactttactaatgtagatttcctctacagatgtaaattttttgtataaaacagcagctttgcagagctactcctgtgtcttcagcttctcagaataacgagcttgaaatacgcaaagaagaatgttttagggtggcatatcttggtttttgtgagtgacgccaaggtcagaggtaaccaggtccacgaacatttgtgtctttccataatgttggacttaactgatgctatttcagttacaaaagccaccagctatgtggagttcccagggagccaattcttcttagtacttctcatccactcattagatctgcaggcacacaggttccagcctctgcaccagccagtcagtattgcaaaccgtacacaatcgtatactctgtcaatatataaatgttactgattaaacattgtgcaacaaacaaaataacatttaacattaagagaaagggaataggaaaagggttaatgaagtagtccagggagagcaataaagaaaaaaagaatttcctggtctgggctggttaatctggttggttgtgcaagaaacagtctttgatgtgggcagagccttcggggcagatgccaggtgcttgtcacgagttagaaccgtacctaccctttttatggccacagagtcctccagtgaggactgatagttgaagactgtgcttgtttatctacttatctggttggatgcagtctttatcaagcaaaacatcttgtctctgttgtgacaaaatggtgtaaaaaaaaagtcataaaaaatgtacagttttaggaatttgctgaaaacaaaatgttggctatttcctcatgaagtctttcacatgtcttcatgaaaatggagctggccaggtacagtggctgacacctgtaatcccagcactttgggaggctgaggcaggtggattgcttgagtctaggagttcgagaccagtttggtcaacatggtgaaacaccatctgtacacacacacacacacacacacaaaattagctgagcttggtggtgcatgcctgtagtcctagctactcaggaagctgaggtaggaggatggcttgagccctggaggcgacggttgcagtgagccaagattgcgccactgcactccagcctgggtacagagtgagaccctgtctcaaaaaggagtggggagaaaatggaactctttgtttgtttgtgtaaaggaaaataaaccctctcaggactgcccaaactctttatgccaaatggaaacttaagactggagagacagtcacgtgacactgctgctgtcccctcgcaccttgcccccctgcccagtagatagctgcgacttcccaaccttgtgtcaaagcgctatgcattagccacacccctggagaaggcagaaggcctcgtgcatcccggatgactgccctcaaattgctcataagtaaattctctgctggtccctaaacctttcaagatgtgtatcttcccataaaaaaggacatgtcagctgtaactttaggtctgcaatctaagtctagctccctgtccacggaattgcagtctgttacatttcacactgacaatgcccattacaagcttatcttcccaggtgcagaacaaagacaggacagcagtcatttctctgcctaccctgagactacataattaactcttcctttactccctttttgaatgtttatcatatctcttttatagcggagtttactgggcactagttaaaatctcaggagaatgttgcatttgcctcaccacctgcccccttttcctgcatgccttctcccctttaaagaaatgggtaaataccgagcaacctctttgggagcgccagccacagaggattctgtgatttgtgtgtttctcagcagcccctcaagctctggcttaattattccccattgagactcttgcctcagtctctcatttgggttgacatttgtttatggaaatcgtgatagccacagatattattgtttcttcagtatctttttctggagaagaaactgtaaattatcttctttatcacactttccttttaccttcagttttgtgctattttttctctgtgatactttatttttcttatgaataatagttataatgtgatttattttctgttcagaagagtgttcaactttgatgttgataagaagcaagtttttatgactgaccaaatccttattttatgacattactaggaatgtgctgcttgttctcattgtgtaagattttaattattctgataatgaaactgattatttcatgtggaagtcttctaatttggctagaataagctattgtcaacatttatcagaagattaagacccactaataaagagctccagtggatcaagaaaatacccaattaacagccaattcagagaaaaaaaacagatggccataaacttgagaaaagatgctgaatctcactagtaataaggaagatgtaccttaaaacaggatattgggtttttgcctttaaattagatgtccaagttgggaaatgtgcaatctcagatattactggtaggatgtaaattggtacagcctttgaaagtatgatttaactcatcttgaagtttaaaaatgtagatactggttgaatattcctaatccaaacatctgaaatgtgaaatactctaaaatttgaaacttttaaagtgccaacatgatactcaaaggcaatgctcactgaagcattctggatttttttggattagggaaccttagccagtaatatagtgtaaatattccaaattctgaaagacttctggtcccaagcattttggataagggacattcaacctgactacttgacctactaattnnnnnnnnnnnnnnnnnnnnnnnnnnnnnnnnnnnnnnnnnnnnnnnnnnnnnnnnnnnnnnnnnnnnnnnnnnnnnnnnnnnnnnnnnnnnnnnnnnnnnnnnnnnnnnnnnnnnnnnnnnnnnnnnnnnnnnnnnnnnnnnnnnnnnnnnnnnnnnnnnnnnnnnnnnnnnnnnnnnnnnnnnnnnnnnnnnnnnnnnnnnnnnnnnnnnnnnnnnnnnnnnnnnnnnnnnnnnnnnnnnnnnnnnnnnnnnnnnnnnnnnnnnnnnnnnnnnnnnnnnnnnnnnnnnnnnnnnnnnnnnnnnnnnnnnnnnnnnnnnnnnnnnnnnnnnnnnnnnnnnnnnnnnnnnnnnnnnnnnnnnnnnnnnnnnnnnnnnnnnnnnnnnnnnnnnnnnnnnnnnnnnnnnnnnnnnnnnnnnnnnnnnnnnnnnnnnnnnnnnnnnnnnnnnnnnnnnnnnnnnnnnnnnnnnnnnnnnnnnnnnnnnnnnnnnnnnnnnnnnnnnnnnnnnnnnnnnnnnnnnnnnnnnnnnnnnnnnnnnnnnnnnnnnnnnnnnnnnnnnnnnnnnnnnnnnnnnnnnnnnnnnnnnnnnnnnnnnnnnnnnnnnnnnnnnnnnnnnnnnnnnnnnnnnnnnnnnnnnnnnnnnnnnnnnnnnnnnnnnnnnnnnnnnnnnnnnnnnnnnnnnnnnnnnnnnnnnnnnnnnnnnnnnnnnnnnnnnnnnnnnnnnnnnnnnnnnnnnnnnnnnnnnnnnnnnnnnnnnnnnnnnnnnnnnnnnnnnnnnnnnnnnnnnnnnnnnnnnnnnnnnnnnnnnnnnnnnnnnnnnnnnnnnnnnnnnnnnnnnnnnnnnnnnnnnnnnnnnnnnnnnnnnnnnnnnnnnnnnnnnnnnnnnnnnnnnnnnnnnnnnnnnnnnnnnnnnnnnnnnnnnnnnnnnnnnnnnnnnnnnnnnnnnnnnnnnnnnnnnnnnnnnnnnnnnnnnnnnnnnnnnnnnnnnnnnnnnnnnnnnnnnnnnnnnnnnnnnnnnnnnnnnnnnnnnnnnnnnnnnnnnnnnnnnnnnnnnnnnnnnnnnnnnnnnnnnnnnnnnnnnnnnnnnnnnnnnnnnnnnnnnnnnnnnnnnnnnnnnnnnnnnnnnnnnnnnnnnnnnnnnnnnnnnnnnnnnnnnnnnnnnnnnnnnnnnnnnnnnnnnnnnnnnnnnnnnnnnnnnnnnnnnnnnnnnnnnnnnnnnnnnnnnnnnnnnnnnnnnnnnnnnnnnnnnnnnnnnnnnnnnnnnnnnnnnnnnnnnnnnnnnnnnnnnnnnnnnnnnnnnnnnnnnnnnnnnnnnnnnnnnnnnnnnnnnnnnnnnnnnnnnnnnnnnnnnnnnnnnnnnnnnnnnnnnnnnnnnnnnnnnnnnnnnnnnnnnnnnnnnnnnnnnnnnnnnnnnnnnnnnnnnnnnnnnnnnnnnnnnnnnnnnnnnnnnnnnnnnnnnnnnnnnnnnnnnnnnnnnnnnnnnnnnnnnnnnnnnnnnnnnnnnnnnnnnnnnnnnnnnnnnnnnnnnnnnnnnnnnnnnnnnnnnnnnnnnnnnnnnnnnnnnnnnnnnnnnnnnnnnnnnnnnnnnnnnnnnnnnnnnnnnnnnnnnnnnnnnnnnnnnnnnnnnnnnnnnnnnnnnnnnnnnnnnnnnnnnnnnnnnnnnnnnnnnnnnnnnnnnnnnnnnnnnnnnnnnnnnnnnnnnnnnnnnnnnnnnnnnnnnnnnnnnnnnnnnnnnnnnnnnnnnnnnnnnnnnnnnnnnnnnnnnnnnnnnnnnnnnnnnnnnnnnnnnnnnnnnnnnnnnnnnnnnnnnnnnnnnnnnnnnnnnnnnnnnnnnnnnnnnnnnnnnnnnnnnnnnnnnnnnnnnnnnnnnnnnnnnnnnnnnnnnnnnnnnnnnnnnnnnnnnnnnnnnnnnnnnnnnnnnnnnnnnnnnnnnnnnnnnnnnnnnnnnnnnnnnnnnnnnnnnnnnnnnnnnnnnnnnnnnnnnnnnnnnnnnnnnnnnnnnnnnnnnnnnnnnnnnnnnnnnnnnnnnnnnnnnnnnnnnnnnnnnnnnnnnnnnnnnnnnnnnnnnnnnnnnnnnnnnnnnnnnnnnnnnnnnnnnnnnnnnnnnnnnnnnnnnnnnnnnnnnnnnnnnnnnnnnnnnnnnnnnnnnnnnnnnnnnnnnnnnnnnnnnnnnnnnnnnnnnnnnnnnnnnnnnnnnnnnnnnnnnnnnnnnnnnnnnnnnnnnnnnnnnnnnnnnnnnnnnnnnnnnnnnnnnnnnnnnnnnnnnnnnnnnnnnnnnnnnnnnnnnnnnnnnnnnnnnnnnnnnnnnnnnnnnnnnnnnnnnnnnnnnnnnnnnnnnnnnnnnnnnnnnnnnnnnnnnnnnnnnnnnnnnnnnnnnnnnnnnnnnnnnnnnnnnnnnnnnnnnnnnnnnnnnnnnnnnnnnnnnnnnnnnnnnnnnnnnnnnnnnnnnnnnnnnnnnnnnnnnnnnnnnnnnnnnnnnnnnnnnnnnnnnnnnnnnnnnnnnnnnnnnnnnnnnnnnnnnnnnnnnnnnnnnnnnnnnnnnnnnnnnnnnnnnnnnnnnnnnnnnnnnnnnnnnnnnnnnnnnnnnnnnnnnnnnnnnnnnnnnnnnnnnnnnnnnnnnnnnnnnnnnnnnnnnnnnnnnnnnnnnnnnnnnnnnnnnnnnnnnnnnnnnnnnnnnnnnnnnnnnnnnnnnnnnnnnnnnnnnnnnnnnnnnnnnnnnnnnnnnnnnnnnnnnnnnnnnnnnnnnnnnnnnnnnnnnnnnnnnnnnnnnnnnnnnnnnnnnnnnnnnnnnnnnnnnnnnnnnnnnnnnnnnnnnnnnnnnnnnnnnnnnnnnnnnnnnnnnnnnnnnnnnnnnnnnnnnnnnnnnnnnnnnnnnnnnnnnnnnnnnnnnnnnnnnnnnnnnnnnnnnnnnnnnnnnnnnnnnnnnnnnnnnnnnnnnnnnnnnnnnnnnnnnnnnnnnnnnnnnnnnnnnnnnnnnnnnnnnnnnnnnnnnnnnnnnnnnnnnnnnnnnnnnnnnnnnnnnnnnnnnnnnnnnnnnnnnnnnnnnnnnnnnnnnnnnnnnnnnnnnnnnnnnnnnnnnnnnnnnnnnnnnnnnnnnnnnnnnnnnnnnnnnnnnnnnnnnnnnnnnnnnnnnnnnnnnnnnnnnnnnnnnnnnnnnnnnnnnnnnnnnnnnnnnnnnnnnnnnnnnnnnnnnnnnnnnnnnnnnnnnnnnnnnnnnnnnnnnnnnnnnnnnnnnnnnnnnnnnnnnnnnnnnnnnnnnnnnnnnnnnnnnnnnnnnnnnnnnnnnnnnnnnnnnnnnnnnnnnnnnnnnnnnnnnnnnnnnnnnnnnnnnnnnnnnnnnnnnnnnnnnnnnnnnnnnnnnnnnnnnnnnnnnnnnnnnnnnnnnnnnnnnnnnnnnnnnnnnnnnnnnnnnnnnnnnnnnnnnnnnnnnnnnnnnnnnnnnnnnnnnnnnnnnnnnnnnnnnnnnnnnnnnnnnnnnnnnnnnnnnnnnnnnnnnnnnnnnnnnnnnnnnnnnnnnnnnnnnnnnnnnnnnnnnnnnnnnnnnnnnnnnnnnnnnnnnnnnnnnnnnnnnnnnnnnnnnnnnnnnnnnnnnnnnnnnnnnnnnctaatttttgtatttttagtagagacggggtttcaccatattggccagtctggtctcaaactcctgaccttgtgatccgccccctcttggcctcccaaagtgctgggatttacaggtgtgagccactgcggccggccaagctcagtctttttttttttttttttttttttgagaccaagtctcgctctgtcacccaggctggagtgcagtggtgcaatctcagctcactgtgacctccacctcacaggttcaagtgattctcctgcctcagcctcctgagtagatgggattacaggcacccgccactatgcctggagtttttttttaagtagagtcagggtttcaccatgtaggccaggctggtttccgactcctgacctcaagtgatccccctgcctcagcctcccaaagtgctaggattgcaggcatgagccactgtgcccagccccagctcagtgatttttatagacaaactggaacccatgtgatgtgacttattcaaggttatagcgtctttgtggcagagccagaagtcgaaccgagtccttgtcccctgtctgaaccttgtttctttactggtcattgttgactttttacccaataaaatttgaacctttgattttcctggcaatatgtgtttgcttttaagttgtgggtcattatggattttatgaattagggcatctattagggtacctggcagatgtagtgtggaggataagcttggatatttcagggtcagactgcctgtgttcagatcccaactataccatttattgactgagatgttgtcaacctacatagattctcaatttttctcttctgtaaagtgagtgacatttataatagtaatacatatcttatatggttgtgtgacaaatatgttaggtacactgatcatctagtaaaaattagctgtggttattctcttttgagcaaaatacaacgaaaggttgcctcattgtgttcttcatggtcttttgcagcctggcgctatgtgggagccgtcggaggcttcctcttcattggcatccagctcctcctgctcgtggagtttgcacataagtggaacaagaactggtgtgtgcctttatggaaagcttcccattgactcacagaaactgcccagttttgaccaaggctgtactcaactgcattgctagggatttgcagttttgtttccctttatacctgcttttttgtacctcttcatttactcctctccttcattcacttctcactttttgaccccctgcccctactcccttgcttgggctctgagtcaaccagtggtgtgaattagccacactcaatcccctgctcgtacgggtctcgatctcctgacctcgtgatccgcccacctcggcctcccaaagtgctgggattacaggctcgagccaccgcacctggccttgctgtgtttttttaacagactcttgcttataagaatctagaaaatgtgctcattgctcttaatagaacaactaaagtaccttttcttccctttttcatttatctctttgtaaatatcttgagaaggagatgatcctaaaaacagtaggatagaaaggtcatgggcctggcaaccaggagatgcagatttcagtacccttttgttttctttttcttttattattattattattattattattattatttttgagatgggatcccactttgtcattcaggctggagtgcagttgtgtgatcatggctcactgcagcttcgatttcccaggcttcagtgattctcccacctcagccccctgagaagctgggactacaggcatgtggcaccacacttggctaatttctttttctgtttgcttggtagagatgggatttcgccacgtcgcccaggctgatcttgaattcctgggttaaagagatccttctgccttggcctcccaaagtactgggatgacattgtgttcggcttcagtgccccttttaatgcttgctctcactgtagagctcatcagtcggcccctctgacctccattttcacacttaaataatgtgtttggactaactggtgtgttctttttttttcctttctagctcaaattttgtggtttacagtgtcaattctctattagaattgaaacaaagggctttaggtgtcgagtgtaaagactttttttggatttttagtgggatgggagagcaccagagggccttaaaaagggaggaatataatctgttttaagtccagaaaggtgaaaaggtgtcaggggtgcaagtaaggaggtcagggggagtcaatccaggtgagggaggagtagtctggaactaagtggtagcaaggagctggatcctcctatgttccaaagccagctctgggtggaggtgggtgggggaggggagagcagcaagaagcttccagagtgaccacagttcttttgttcttttcttttcttttcttttcttttgagacagagtctcgttctgtcgcccaggctggagtgcagtggcacaatctcggctcactgcaagctccgcctcccgggttcgtgccattttcctgcctcagcctctcaagtagctgggactacagtcgcctgccaccatgcccggctaattttttgtattttttagtagagacggggtttcaccgtgttagccaggatggtctcgatctcctgacctggtgatccgcccacctcggcctcccaaagtgctgggattacaggcgtgagccactgcacccggcttcttttcttttcatttcatttcatttcattttcttccttccttccttccttccttccttccttccttccttccttccttccttctttccttcctgcctttcctcttcctttccttttccttttcctttcctctttctttgctttcctttctttcctttcctctttctttctttccctcttcccctaacaatgggaagttggagttgctgttttctgaggttgggataattgcacaatagcaggtttgggggatggaggaatgggggtgtcaatatcaggaagttagccttagcctggatgtgccaagtttgagataccagttagaccttcaagtgggtctccaattgttaaatgaacaaggggataatataagtgacattcaggggaaaggttagggttgaagatttaactttgggatggactgtaaacataaattaactgaaagaaagtccttcatattctaataacataaccaaaaagactagtgaatagaagcgttggtcgtctcccacgcacaaaccagtcagcagtgtttacctttttctgtataattcatgctgtctccccatcatccattattatttgctcttagatatttttttccttcttaaaatcccatttttctctcatttcctttgtatgccttttatgttagaataattccaaggtcattggagtgtctggcacagtttcaggaatatgacggtcattatcattttggcctttcctccctattttctttgtttctggttgcaggaactttttcatcattaaaacattttagctgggttgcttgaacactttccagttttgtgagggcataaagcaagttgctttttctgtgaggtttgggagaatgtggttacaaagagcaatttaatcataaggcagatgacaatgattcattcaattcattctccctgttctgtcctcttcatttagcatttatagatacttttttttgttctgaacaatttccctttttgtgtgagacagggtcttgctctgttgcccaggctagagtgcagtggcatgatctgggctcaccgcagcctctgcctctggtgtccaagcgattcagccactcaagtagctgggattacaggcatgcaccaccacgcccggataatttttgtatttttggtagagatggggtttcgccatgttggtcaggctggtctcgaattcctgacctcgtgatctgtccgccttggcctcccaaagtgctgggattacaggcatgagccaccatgccctaatttattttttaattgacatattgtaattgtacatatttatcgggttcattttgacgttttgatacatatatgttatatagtaatcaaatcaaggtagttggctattcattacctcatggatttatcatctttttctttctttcctttctttttttgtctttttttttaaagagacagggtctcactctgtcacccaggctggagtgccgtggcgcagtcatagctcactgcagccttgaactcctaggctcaagaaatcctcctgcctctgcctcccaagaagctggctaattagcatgtccagctaatttttttgtttgttttttgttttggtttggtttttggtttttgtagatggggtcttgctctgttggccaggctgtatcatttctttgtgttgagaatcttcaaaagcctctcctctagctgttttgtaatatacaataccttactgctagccatcatcaccctaccatacagttgatcaccagaatttattcctatctatttaactttttttaatgtcaaattttcctttactattccctgatactattttagataaagaagcagcacagttacaggtccttctcttcagtacagggaataaagagctaaggtcagccagtatggctcttagtaaaggtaattctctttcctccctaagaagatggcatcagagctgctggcaacactttgtttctgtttttaaaagtttatttattattattatcaaacatttagggccaggcacagtggctcatgcctgtaatcctagcactttgggaggcagaggtgggtggatcacgaggtcaggagttcaagaccagcctggccaagatggtgaaaccccgtctttactaaaaatacaaaattagcccggcatggtggtggatacctgtaatcccagctactaaggaggctgaggcagagaattacttgaacctgggaggcgggggttgcaatgagccaagatcacaccacagcactccagcctgggcgacagagcaagactctgtctcaaaaaaaaataaaataaaaaatttagacagggtcttactcttgcccaaactggagtgcagtagtacagtcatggctcatagcagccttcatccacccgagctcaggtgatcctcctacctcagtctcccaagcagctgggactacaagtttgcaccacaacatgctgctaatttttgtagagacaaggttttgccttgttgcccaggctggtcttgagctcctagcttcaagtgattcacctgcctcggcctctcaaagtgctgggattacaggtgtgagccacctctcctggcagcactttggagtagagactatggcgcttcggggctctgtgtttatggagaaaacttggggaagcccagtgaagagccacttttttcatcctgccaaaaactgacccacggtggttcatagtcagaatggagaagctagaataaagtctgtaggtagctaaaggaaataaagagtctcaggactgctcaaactcattacaccaaatggagagttaagcctggagacacagtcatgtgacactgctgtctccccccacctgcccatagatagctgtgacttcccaaccttgtgtcaaaggactacacattagctagatctctacagaaggcaaaaggccccatgcaacccggatggctgccctcaaattgctcataagtaaattctctgcttgtccctaaacctttcaagatgtgtatcttcccataaaaaaggacatgtcagctgtaactttaggtctgcgacctaagtctagctccctgtccatggaattgcagtctgttacatttcacactgacaatgtccattacaagcttatcttcccaggtgcagaacaaagacaggacagcagtcatttctctgcttaccctgagactacataattaactcttcctttactccctttttgaatgttgatcatatctcttgtatagcagggtttactgggcactagttaaaatctcaggggaatgtcacgtttgcctcaccacctgcccccttttcctgcgtgccttctcccctttaaagaaatgggtaaatactgagccttctgcaacctctttgggagcaccagccacagaagattctgtgacttgtgtgcttttaggtgcaccctcagacctctggctcagtacacctcggctgattgagactgttgcctcagtctctcatttgggttgacattattcattttaatgaatgaatacatttgtcgcagaaagtggaattctctcattgttgagagaaaattctcagcttgagtcaagaagtttccatatttaccagaaccttctagctttgatgagcataatcactgctaaaataatgtgtcttctgagcagctgggtaccagtgcctgtggcctgtagcattagttactgcctgagggatggtgactgttaccgcagaatggtgggcttcgttgacttgtcttctctcctctccctcttacccacttcccggagaaacaggacagcaggcacagccagtaacaagctgtggtacgcctccctggccctggtgacgctcatcatgtattccattgccactggaggcttggttttgatggcagtgttttatacacagaaagacagctgcatggaaaacaaaattctgctgggagtaaatggaggcctgtgcctgcttatatcattggtagccatctcaccctgggtccaaaatcgtaagcatgtttttttccattcttcgttacttatattttcctaagtgtctttgagcaaacccaatggctttttttgttttgttttgtttgtttggaactagtgtattccttaacttactgtggatgtgtcagcagtaggcaaggtggggctccagtctcttcatatctcatgctcgagctgtgatagccaagcatttctcatgtcgagaaagacctgaacgtaacgaagtcaatgaataggaagatactgcctttgctaaataatgtaccacaaagagcctttaaatgggaaatgccttccgtgtatatcaagatcaggtgtttatgagcttgcctacaatctctgtgtaaaagttgaatgaaagggccgcagaaggggttggttctggggtcatctttcactcaaggctgtggacagtgtggtctgggagtcaggaagcaggacatcccatcccagctcagccagcagctggcccatgtgctaaccttccttagacccaggttcttcctcagtaaactcagtggaaacatgtgagcctgaccttgctcattgttgtttcaaagccggaaggaagagacagtgggatctgaaagtgctttaggaagtataaatgtgaattgccatttataaactactcttggtttcttaagccagggtatagtgtctttgggcttacagtgagatgtccctggtctgattttttttgtgggtgtcggaccctataggtgatgaaaatgcacatgacattcaggttctaggtaggaaaatacaggcaataaatgtacagcccccttgaatcatttctaaaatagtggtttaaaaaggcaactagtggtcgggcgcagttgttcatgcctgtaatcccagcactttgggaggctgaggcaggcagatcgtctgaggtcaggagttcaagactagcctggccaacttcgggaaaccccgtctctacaaaaaaatacccagaaaattagccagccatggtgggacacgcctgtattcccagctacccgggaggctgagaggcaggagaattgcttgaacccgggaggcggggcttgcagtgagccaagatcccaccactgcactccagcctgggtgacagtgagactctgtgtcgaaaaaaaaaaaggcaactagtcacaaataatttgttttcttctattaaaaattttaagaccattattgaaattgagagtattattctcctaatccctttaattgatcagttaagagttcctagaacaacttgatattccgattaaaatctttgggttaagtcctaccttttgaaatagggataatgttttgaaatacttggtttaataccattaggtgctaaggaaaatcttattcccttgccaaagagcaacattataacagggtctattttatgtctttattggtaattacaatttaataatgataattttggaaacaaatttgaccaaagggaagactgagtaaaaactgcatccttttatgtcggcaagtggtcgaaaatttcgcaggaaagaaagagagatcccttatcacatcctggttactctgaaggatctgaacccttagtttccttgaaatattataactttcaaaaaataacagatggcttgtgaagtttcagagaaaaatgaacacttatacactgttggtgggaatgtaaattagttcaaccatagtggaaagcagggtggcaattcctcaaagacctaaaaacaaaactatcattaggtccagcaatctcattactgggtatatacccaaaagaatataaatggttctcacataaagacacaggcattcacaatagcaaagatatggaatcaccgacatgcccgtcaatggtagattgaataaagaaaatgtggtacatatacactatggaatctatggaatacggtgtagccataaaaaggaaagagatcatgtcctttgcaggaacgtggatggggctggaggacattatccttagcaaactaacacaggaacagaaaaccaaataccacatgttcttgcttaaaagtgggagctaaatgatgagaacatgtggacacatagaggggaacaacacacactggggcctatcagagggtggaggtgggaggaaggagaggatcaggaaagataactaatgggtactaggcttaatacctgggtgacgaaataatctatatgacaaacccctgtggcaattttccccttacaacaaacctgcacatacacccctaaacctaaaataaaagttaaaaataaatgaataaataaataaataaccttaaagccattctcccagtgaatgctgagccccatagccttcctctttagccaagagcagttcttgtattctgtccccaaaagctttttgatcattggcaggtaagagctttttgccctgtcatagactgtagtatgtgatgaccttgtagaatccagaatacatcccctatgaaatctggtttaccacttactcccctccccaattaagctatgtggttttatcaacaactatggtaattttttttctgatcttgtgatttaagaactaatgttacaaacctcagggagactagttagtgtgttttaagtgtagccataggcttgataaagtattggtagataacttggcagaacctgatgtctttgaagtagcaatgttcagttcagcgtgtaactctctcccccttaatatctttttagttttatctgagaaacatactacatttttttctcttttctttcctttaaaggtggatgctcaagtttgaggactgtcatggggactatcaggttttttaggcatgtgctttctttttcttcaaattaaaacctgttgtctgtctcttgtcacttttcaggacagccacactcggggctcttacaatcaggggtcataagctgctatgtcacctacctcaccttctcagctctgtccagcaaacctgcagaagtaggtaagccagcctgttagtgggcttgtgtttgcggtgtgaatattttcattcatggaggaatgagctattgtttaaatattggagaggccttggagatagagagcagaaagatggttaccagaggctgggaagggtttgggaggaggttaggatgattaatgggtacaaaataaataggaagaatgaataagacctagtatttgatagcacaacagggtgactatagtcaaatttaattgtacatttaaaaataactaaaagagtataattggattgcttgtataacacaaaagatcagtgcatgaggggatgggtaccccattttagatgacgtgattgttacatgtttcacacctgtattaaaacatctcatgtaccacagaaatatgtacgcctactatgtatccacaaaaattaagttaaaaaataaaaataaacgttagaaatgtaccaaatcacagtagagagatgatctagactttttcatgaaaaagtctttaacttgagctatgtaaaggaaaattccctttttcgattcttcctggtgtgtaggacagacaggaggaaaggtttggctgtggagtttgcttttaggcctaaataacctccttagttgtatttcttttcttttctgactatagcagtggaataaagagtggaaagaatgtgggggagtggggagcagggagcaggatctgagcacagatccatgatttactggctatgtgacctcaaaccactcgtcttaaatgacatttatttacagagacaacagaacatagtgattagagcatgagctttgaagtcggactgcctggtttatagactgatcctgctacttaagtaacttgcagaaacttacttatcctctctattacttatgtgatgtataaatgtaaatatacacagacatacatacatatatacatacatacacataagcatatataaatgtatgtttgagtatatttgagcttatataagtcaaataaatgtagtgtctaagagaattgaagttgtttcctcttttaaatttggaaagctggtgcaatgataattttgaaagttttagcatatacacatagtatttatgggtttgtccttgttgctgtttatagtggaaagtaatgtaagtggaggtcttaagtaactattgcctaacctggatttaagttttttttttaaatactctatcttgactctgtaagtttacataaatttagtctctttaagactttcttttatgactgtttatgtattaatttctggctttaacttactgggatttttatttacaatattttttaaatggcaggtatccctttaaaacagaaaaaaaaggctgagcgtggtggcacatgcctgtaatctaagcaccttgggaggctgaggcaggaagattgcttgcagccaggagctgagaccagccttggcaacatagcatctctacaaaaaaaaaaaaaaaaaaaaacagaaaaaaagttattttaaatttcaagtgctctacatttttttaattagcctaagaataaagattcttgaaaccacagcatacacagggaagtttatagcattaaatgcctatatgaaaaaagcagaaagattacaaattaacaacctaacattgcacctggaactagaaaatcaagaagaaatcaaacccaaagttagcagaacaaaagaaataacaaagatcagggctgtgtgagttggctcatgcttgtaatcctagcactttgggaggttgaggcaggcagattgcaggagcccaggagtttgagaccagcctgggcaacatggtgaaaccctgtccctacaaaaaaatacaaaaaattagccaggcatggtggcacatgtctgtagtcccagctactctggaggctgaggtgggaggatcactggagccccagaggttgaggctgcagtgagctgtgagctcttattgcaccactgcactctacccagggcaatagacagggactttgtctcaaaaaaataaaataaaataaggaactaaataaaataaagacccccctcccccccaaaaaaacccatgagaacaatacagaggatcaacaaaacaaaaaaaaggtggtttgttgaaaagataaacaaaattgataagcccctggactaaccaagaagagagaagaccaaatcaacaaaattagaaatgaaaaaggaaaaatcacaataataaccacaaaagtacaaaagatcattacagactattatgaacttccatatacttacaaactagaaaagctagaggaaatggatacatttctggaaagcaagaaggaatagaaatcctaaacaggccaataatgagtagtgatattgaatcagtgatttaaaaaatcttccaataagaaaaagccaggaccgaatggagtcatagccaaatcctaccaaacatataagggagaactaataccaatcctcctgaaattgtgccaaaaaatggaggaggagagaactctccctgactcattatacaaggccagatatatcaccctgaaaaccaaaaccagacaaggacacaacaaaaaaaaattacagaccaatacccctgatgaacatagatggaaaaatcttcaacaaaatactagcaaacacgatgtaatagtacatcagaagataatataccatgatcaagtgggtattataccatggatgcaagaatggttcaacatatgcaaattaataaatatgatacatcatacattacatattacataaacagaattaaagataaaaaccatatgatcatttcaatagatgcagaaaaagcatttgttaaaattcagcatcttttcatggtaaaaaaaaaaaccctcaataaagtaggaacataacttaaaataatagaaggaatacaacttaaaataataaaggtcatatatgataagcccgcagccagtatcatactgagtggggaaaaatgggaagcattacttttgagaactgaaccaagataagggtgcctgccttcaccatgcctattcaccatagtactggaagtcctagccaggacactcaggcaagaggaagaaataaaaggtatccaaattggaagagaggaagtcaaattgtcgtgtttgttgatgatgtgattctatatctagaaaacccaaaaggctccaccaaaacactgttagatttgagtaatgaattcagtaatattgcagtatacaaagtcaacatacaaaaattagtagtgttttggctgggtgcattggctcacatctgtaatcccagcactttgggagggcagggtgggtggatcatttgaggtcgggagcttgagaccagcttggccaacatggtgagacctcgtgtctactaaaaatacaaaaattagccagtcatagtggtgtgcacatctgtaatcccaactacttgggaggctgagacaggagaatcacttgaacctgggagggggagggatcttggctcactagccaagatcgcactacagcacccctgcaccccagcctggacaacagagtgaaactccgcctcaaaaaaaaaaagtcagtagtgtttctatacaccagtaatcatctagcagagaaccaaatcaagaagccagtcccatttacaatggctacaaaaaataaaataactaggaataaatttaacgaaggacgtgaaagatctttacaatgaaaactactaaacattgatgaaaaacttaaaaggaggggccatgtgtagtttcacatccctgtgatcccagcactttgggaggccaaggtgggaggatggcttgaggccaggaatttgaggccggcctgagcaacatagggaaatcccatctctacaaaaaatttacaaattagctgagtgtggtggcatgcacctgtagttctagctactcatgggtccgaggttggaggatcacctgagcccaggagcttgaggttatggtgagctatgatcaggccactgtactccagactgggtgaaagagcaagaccacgtctcaaaaaaataaaaataaaaaggatgcaagcgaatggaaagacatcccatgctcatggatcaggagaataaatattgttaaaatgaccatattgcctaaagcagtcttacagatttagcgctatccctatcaaaataccaatgacatttttcacagaaaaacaatcctaaaatttgtatagaaacaacagagccagaatagctaaagcaatcctaagcaaaaagaacaaaacttggaggaatcacacttcaaagctggaggagtcccttcttcaaattatgctacaaagctacagtaagcaaaacagcatgatatttgtataagaatagatccatggaaccacatagagaacccagaagtaaagccacatatttatagccatctggtctttgacaaagttgacaagaacacacactggggaaaggatacccttttcaataagtggtcctggaaaatttggatttccatatgctgaacccctaccgaacccctgtctctcaccacatacaaaaatcaacaaaaatcaacaaaaggtggattaaagacttacatgtaagacctgaaactgtaaaaatgctagaagaaaacctaggaaaactcttctggatattgctcaagggaaataattcatgactaagacctcaaaagcacagacaacaaaaacaaaaccagacaaatggaactatgttaatctaattagcttctgtacagcaaaagaaataatcaacagagtgaagagacaacctgcagaatcagagaaaatatttgcaaactgtgtcttataggggagcaatatgcagaatttacaaggaacacaattcaacaacaaaaaacaccaaataatcccattaaaaagtagtcaaagaacatgaatagacatttcattttttttctaaagaagacatataaatggccaacaggcatttgaaaaaaatgctcaacattgctaatcatcagagaaatgcaaattaaaaccataactagatgtcatttcacaccagtcagagtggctattattaaaaagacaaaaagtaacagatgttggtaaggatgtggagaaacggaaacacttatactgttgatgggaatgtaaattagcatagcttctatgggaaacagtgggagatttctcagagaactaaaaatagagctaccatttgattcagcaatcccactactgggtagctacaaaaaggaaaataaatcattatatcaaaaagataactgcacctctgtgtttatcgcagcactgttcacaatagcaaagataaggaatcacctttaagtgtccatcaacagatgattggataaagaaaatgtgatttttatatatatacatacatacatatatatatatacacgtgtgtatatatatacacgtatatatacacgtatatatatacatatacacacatatatacatatatatacacacacatatatatatacacatatatatacacacacacacacatatatatatctatctccacacaatggaatactattcagccataaaaaagaatgaaatcctgtcttttgtagcaacatggatggaactggaagccattatcttaagtgaaacaagcagacacagacaaatactgcatgttctcacttttaagtgggagctaaataatgtgtacacatggacatgagtgtggaatgatagtgaagactcaaacataggaaggagggaggggatggatggtgagaaattacttaatgggtagaatacacattatttggtgatagatacactaaaagccaagacttcaccactacatgtaaaaaagttacacttgtaccccataaatttatacaaataataaaagattccttaaaccacagcatacatagttacgtttactgtttcaagtgcaaatactagtcataattttagtctcacttcagacacttgaaatatgcacgtttgtaaagtggtttctagagtgttactttatgttacttgctttggtggcaaagttggcagtcagacctaggttgggtgttccaaatggaagactccatgttaggtaaaaggtaaattaccactgatggttatattataggaatctttgttacgtagtgtttagaataactcagtttttcttactgtttcacactacaacagtcaacacagaaggtttctgtgacactaaaataagtggagatttctccccaccagcaagcaggcagtggacatcagttgggtgtcctccaatccaattcggatgctctacctggagataaggtcagatcccacaggtcgaaggctcaattccacaaaacagccctaccattcccactggtcacaagtccggccctccagaacttctgaccaactgttagggctcccacagttaccccttctttgggatggattaatttgatagagtggctcacagatctcaggaaatacttatctttactgatttattacaaaggatattttaaagaatatgaataaacaggcaggtaaaaatatatataaggcaaggtctcaaagggtcctgagctgtctccatgcagttggtgtggctgggttcctaacatgtggatgaggtggtgttcaccttcctgtaagcctccagctctcaggaagctttctgaaccatgtccttttgggccttttatggagacttcattacacaggcatgattgattaaatgattaaaccattggcccttggtgatcaactaccattcctcccattcctggagtttggagagtgggtctgaaagtcccagccctctaatcctaccttggtctttctggtgaccagcccccatcctgaggctacctaggggctgccagccattagtcagtcattaacatataaaaagacaccattttggagatttcaaagattttaggagttgcatgcaagtaaatgcgaatgaagaccaaatatatatttcacaatatcacatgtagccactcacattaaaaaaaaaacacacctcaggagtttccaagttacagacagaaagataccacgattatcatatcacttacagcaaaatgacttctcaactagtttaggagctattgttggctgttgattcacctcagcactgcttggtatctgcaccctacctctctttagaggctgccttgtcaactgaaaaatgcacctgacttcgagcaagactctttccttaggttctggatctgtttgagccccatggcactgagctggaatctgagggtcttgttccaaggatgtgatgatgtgggagaatgttctttgaaagagcagaaatccagtctgcatggaaacagcctgtagagtagaagtttccagtgataagtgttcactgttctaaggaggtacaccacagctacctgaattttcccaaaatgagtgcttctgtgcgttacaactggcctttgtacttgactgtgatgactttgttttttcttttcaagttctagatgaacatgggaaaaatgttacaatctgtgtgcctgactttggtcaagacctgtacagagatgaaaacttggtgactatactggggaccagcctcttaatcggatgtatcttgtattcatggtaagtcttgggagttactcaaggtcacttttgcagactttaaaattacaggaaaagaattgaaataactttcagtagctgtgaggctgcaaccatttgaggaggggggaaaataaccacaagtaaaaaggcgaagagcgtgaactcatatttgaacttcgttcaccttacttgtttttatttggggtaaataaagcaaatatatggtatgtaaatatttgaacttcgtttaccttacttgtttttatttggggtaaataaagcaaatatatggcatgttgcagcaccgttgcctaaccccctttaaaagatggtcgaatagtagtttgctatacctttactggagggcaggggagcacaaagtgaagaagagatagaatgtgccagcatgtcctggcagctttctgatccaaaggaaatagctttcttctgctgttgatggaaagagtacagagtgctgtgtgcgtggtcattctgtgcagacaagaaatgttcattctcttttctgctaaacccacaatgctgttgttcactcggcaaagcagctcctccaaaagtagatgtgatatatgagtgggctgtgtttcagatgcttgtggtgggggttattccacctttaaaaggtttaaaaggttgctagagggagaaaagtcaaggatagaaatggctagttaatctggatatatatttcgctgataactaagcttccctttaacagtaaccttttcacatttagcctttacttctgtgtttacattttgttaatgttcagtataaaaattcaattccattgaattcagccataggcacattgtaaacttcctttttgctgaaacgaaatactcctggtggtgatagcttgtataaatataatgtctttctgagcatgttggcattttctcttacctcctttaacaacttctactattagaaagggaccaacggggacacagaccttttagagtctatttgctcagggtcacacatcaagcaataaaatgcttgttgttttacaggtaggtgttaagatgatggtgacatacattcattcttggcctgtgtgacatagtgacagagtctccttgttgttgcagaatggactgtggtaacttctttctggcctttcaattttattaattcctaagttgttcgcagagtacctacaatataggaagcaggctgcgtggtgcagtggctcacgcctataatcccagcactttgggaggctgaggcaggaggatcacttgaacccaggaatttgagaccagcctagacaacatagcaagaccctgtttctacgaaaaaaaaaaaaaatcaggcgtgatggcacgtgcctgtggtcccagctacttgggaggctgagatgggaggatcacttgaacccaggtgtctaaggctgcagtgagctaggggtgtctccactccagcctaagcaaccgagtgagaccctgtcttttgaaaaaccaaccatgaagatatttgatagaataaaatcatgtttttgtgggttactgggtacccaatgaaaaaaaatatttgcccttggccaggcgcggtggctcacgcttgtaatcccagcactttgggaggcaaaggtgggtggatcacctgaggttaggagtttgagaccagcctggccaacatggtgaaaccccatatctactaaaaatacaaaaattagcggggtgtggtggtatgcacctgtaatcccacctactccggaggctgaggctggagaattgcttgaacccaggagggggaggttgcagtgagctgagatcacgccattgcactccagcctgggtaacgagagaaactgtatttcaaaaaaaaaaaaaaaaaagaaaaaaaaaaccctttaaataaagtagagtttggatttgccataaacccttcaatggaaaagatggcaaaaattcttcttagcctgctgcataatggttaccacacatagggcatttcacaacatggaattttcaccctatcatattttctcactatttctagcaggtgtaaagaattcttctgagttggcccttgagtgagagatgataaataaaatgttgtttcttacaggactgaggtaccatagtggagattggtaagggctggtctgatattcccaaaagatgtcaattttcaaagttgatagctactaaaaaaaaaatctgtctaaataccagcaacaaacattgttattgaattcgtaaaccacaaaactgcagtgtatggtgggatgagaacatataaaactgcagcccctacaaagtggagatgaggatgaccactctgctctgtagcgtacttctgtaatctgtaggcaagagcacactctgtgggctgggccccctaggagttagttcccccggggtccatgtgattgatgtttgctgtaattactcactgcagctcttcgaggggtcagctttaagaacactaaattcaggctttgtagggcctgggaataaaaggaatgctgtaggggtgggagttagcccaactagggttttttcagatctggacttctgaagagtttgttttccttcctgactcagaggaatgaaaggttggaggatgttacaaaaaggccacatcgtccgtgtgggaactgtcatttgaacataattgcaggaatatctaggattcttgatagaaattgcaggaagccagagactatagatagtatgtaagttaaaaggagaagaaggccaagattgcctggggtccactcttgtaaagttgtagaagactggaaatctccctagctcctctctttcccttcgccctccagagcccccaagccccacccccaaatacttgtttcctttggggtatctccatcctgactcttgcagctggggtactctctaggagtatgttttaatgtttgtagcctcagctcagaagaagggctcaacccaaacctactccctgcctttctgcctggggctgccttctctccagagcctccttccattgcacccaggaatcattgctgtgaaagaacatcatagcttggaccccatgtaagccctaaccttggtccacttgtgggagttctctgatagctctttttatttttttagataaaaaaaaatgttttaaggcaagttctcactatgttacccaggctgggtaaactgtccttaagggatcctcctgcctcagcctcccaagtagctgggactacaggcataaccatgacacctggcattctgatggttttctctctctctctctccttctttcttcctttttttttttgagacggagttttgctctttcacccaggctggagtgcaatggcaggatctcagctcactgcaacctccgcctcccaggttcaagcgattctcctgcctcagcctcctgaggagctgggattataggcgcgtgccaccacgccaccatgcccggctaatttttgtatttttagtagagacggggtttcaccatgttggtcaggctggtctcgaactcccaacctcaggtgatccgcccgccttggcctcccaaagtgctgggattacaggcgtgagccgccatggccagccctgatggctctttctataggcgcatccctccacacccctttagtctggagctttgctgtgacaaatcctggcctccacgaactatttcttaattcttcccttggtctctggattttgattgaaattgttattctgttgccttcaacttcagactgtcagcctggacaggatcccagagttgatcaggtcagtctcctcattgtacatgtaaggaagcatggagcctatacctgtagctctctactcccaacttcgggcaacctttccttgaggctccttttcgggagtatttagggacactggtggatagtctctccccggctctttttcttcagatggcttggtgtaatgtcccctgagggagaaagataaactggatgacttgcgtaattatattattacaaggcatttgcactataaagtttcctgaccattccacttttatctgtgtttaagagaaaaaataattcttaatattgaaccatctttgaaaatatccttttaaatataaaactggaaaaagtaagaatctttattcaatgtcaaacaacttcctagtttgaagtggggaggttcgcaggttggtgtgatagcattgccgaggggattgttctacattaaaaaaagttgggaaatcaaggaagaatatttatttttttggtacattctgggcctttatgggggggtggggaaatttgtatcttccccaccaggagagggggagatttgtgtcttcattttgggaattctgctctggcctgcctgccagctagaaatctccaagttagaaatcttccaccccgtggccaggcgtgatggctcacgcctgtaatcccagcaccttgggagggcaaggcgggtggatcgtctgaggtcaggagttcaagaccagcctgaccaaaatggagaaaccccatctgtactaaaaatacaaaattagccgggcatggtggtgcatgcctgtaaccccagctactcgggaggctgagacaggagaatcgtttgaacccagaagacagaggttgtggtgagccgacatcgagccattgcactacagcctgggcaaaaagagtgaaactccatctccagaaaaaaaaaggaaagaaagaaaaagaaatcttccaccccatgccccaggttcacagagagctcaggtctcctttgggttctatagcacaggggagcatgactgatcttcatcattgcacaaaggctgggaatagtcacgggatctgtcaagggcctaccctgtacgtttgtcagggaggcggaatgtgtgatctccaggaaagtttggacgtgttatttagagattttctgtggtctagtggactttggccagcttcaaaagcatctgcagtgccagtgttgaggggcacctgcattgtgcattcttctgccagtgtgaaggggttctgggcactgtagtggttctgcagggaaacaggacacggcttttcttttttttttttttggctgtcaccatgactgcagagcactgctggcattttggctgggttggggtggggtggcagcaggcagagacagtaaacacgctgtggtgtgttaggcattctccgtacaataaagcattgtcttaacccaatgctgtaagtctcctcctatccccacgggaaatactgggttaaagtcacacctatcttagcacaggaagaggtaaggcttataggtaacccaggaattgttttatagcaatttgtgctgtgctcaccaaacagtggtctttgtaatagcctgaatgcagataataagaatttcctaggctttaagagcttataaaaaaaaaaccttttcttgataattccaagaagagtgttgtatggagaaaggctacaactgaataaagatctttttttttttcctgcaacatctgcctcccgggttcaagcaattctcttgcctcagtctcccgagtagctgggattacaggcgccccccaccatgcccggctaatttttatatttttagtagagacagggtctcaccatgttggctaggctggtctcgaattcctgacctcaggtgatctgcccgcttcagcctcccaaagtgttgggattacagatgtgagccaccacgcccggcaactgaataaagatcttaatgtagggtaacatctacctgtagaagtcacatggcattaatgatgctctgaatgtagttctttttaaaagtaaaatcaaaagcttccccatgttaggcctctttgatggtgaagtggcaaaggagcccaaatcaagagctttgttttccggaaattacgttaacccaaagaatttatagagtagaatatttactctgaggctttgtttttctttttgagacagagtctcactttctcgcccaggctagagtacagtagcgtgatctcagctcactgcaacctctgcctcctgagtgtcaagcaattttcctgcctcagccccctgagcagctgggattacagctgccggccaccacacctggctaatttttgtatttttactatagatggggttttgccatgttggccaggctggtctggaactcctgacctcaagggatccacccgccttggcctcccaaagtgctgggattacaggcgtgaaccactgcacctggcctattctgagcctcataaataatgaatgttaacctttcaaatgaaaatttcagatagtgatctcttcttaaaattaaaaacttatcttttcccctgtgaaaactatacactgtactaaatcaaaacttgtatgcacaggatatgtgccactcttttttttttttttttgagacagggtccttctgtcactcaggctgaagtgcactggtgtgatcatgctcactacaacctcccaggctcaatttattctcctgcttcagcctccccagtagctgggactgcagacatgtgccaccacacctggctaatttttgtattttttgtagcgacagggttttgccaagttgtccaagctggtctcgaactcctgggctcaagcgatctacctgccacagcctcccaaagtgctgagattacaggtgtgagccaccacacccagccgggccactcttaaatgtcggattaggtgttgtgttccttgggtgcgcagtcattgggagatgtttctgtcttcctctgaccaggcacacagtcaggaggtggagtggcatgggcctggattagcatgcatcagttcaaagcagaaatgaaagtgatgctgttgtacttgagtggaccacaaaagaaacagtgaacttggatctcagtgggcttctgtatgagaaagctttttattgtttatctctgtctcattgatctctctccttgggaaagaggatgagactgcgcagtgttgcctcatggggttcgctggattgagatgagtgtgtgtccccacctttccatgagcagaccagcttcttgagcaccaacacgcccgcccatgtcaggccagcacagaagctacatgacggcaggattgttgcctgtgtcactgagtccccagtgcttagaatcgggcctgacacatagtggccttcagtaaatatttgctaaatcaatctgtaaagttagctggaaccctaagtattgtatatatttgcttaaaatgttctgtgtttttgttttgtagagatgaggtcttgctatgttgctcaggctcttctcaaactcctggcctcaagtgatccttccaccccttcctctcagagtattacaggcatgagccaccacttctggcctgtttttgttttcaggaaaaataaattattttgccccatgcaaggcaatttgtctaacattttacctttctaggtctcagggaagtggcagaattttttattacctcgactgctactcttccaaacagcaagccttgttctactataggctatcacagtaaataactgcgacttttgctttcatgcccttgctttctgttgccatctctgggctcgttgcttttgattccctctaagcaagactagtcaaagggagggaaagataaactgaaattagaaaactattgtagcatttgagggaggagaggcaaaaagcaatactgaaaaccaagatatcttacttctctacctacaaccttctttgcataaaatgatctaatgcaatccatgtaaaatgatatcaactatagaataagccagccaattttggaataaggagaggtattaaaatagattgctttgatttaagtctcctgaacggtaggttacattgaggctctcgtcggagcactggccagccggctttccccttcattccatgtgttgtaatgtgttaatatgcccagctgacgtttttgtctgtttcttagtttgacatcaacaacaagatcgagttctgacgctctgcaggggcgatacgcagctcctgaattggaggtaagttcatttccttttcctgtcctgcttcatctcagaagatccatttctcaggagggccttttgtgtttgtgtctttatcagtctgcattccgtgatcctgtttttctgctgaggaaagatttttgtatagaaaaataaatgctggccgggtgtggtggctcacgcctgtaatcccagcactttgggagtccgaggcgggtggatcacctgaggtcaggagttcaagaccagcctggccaacatggtgaaaccccatctctactaaaaatacaaaaattagccaggcatggttgctcacacctgtagtcccagctacttgggaggctgagacgcgagaatcacttgaaccctggtggcagaggttgcagtgagccaaggtcataccactgcactccagcctgggcaatagagtgacactttgactcaaaaaaataaaataaaaaagaaaaataaatgctttcctgctttcctttgtatgctatgggattaaaatgaatcagtccattcttgattttctgtaagaaagctggcctcttgggtggcatcctgccgctcacccccaaccagaggctcaggtaaccttgtcaggctgcaccctgcgctcttcccttgccgtagtggagtcttggtgggttttattttaacttctgatccacccacctgtttcatacttgtctgtgccctccatacacagcgtggctgtgagattatgtaatagctgtttggaagaaaggagagaggaaagggaaggaaccatatctgctctgcctgacgctgttgaacgttgtagatacattaactcatttgtcagttccatcaggtgggcgttttgtcaggtagagtgttatggacaatacatacattggttgcctgcacatccaaagcctcaaggtgttcagcagatgcctatcagtcaacaaaatgtctgttattttcttaattgtgcaagagtctttctggggctctcatctaccaacaacagcaaggtctaatcagatggaggcagccagggaaggactcagctgtgacccaagaacgaaaagaaccaggggttccaaagatggctaagacttacagcacttgctatgtcccaggcactgttctaagttcttcctatgtgatttcacttaatcctcataaaaacccagtgacgtgctattacctccattttacagaggggaaaaccagaagagttaagtcatttaagcctcacaggttttgatttgccagaatataaaccgtgtactctggccccaggatctgtgttcttgaccactgctgcccaggagctgagctgctgaaccctggtccttgctgctgactgcgggcagctggtttctggccactgcctgcgttttaatagctttccgtggatggaaaagccctggtgtctgtctagatatgggcattttactctgcagctgggtgtctggggttggtctctcttgcacctgacctggatatagtgagccattatgaagggctgtcaatctgccaacatcattcaccaactctttctgttgcctaaaggagaaaattgtgctgagtttgaataggttactgcctattatagagaagagaatggtctgtagaaggggtgtttattctcaccattgactaggtgaccacctgctgaggttgcatggttatggtttcaatgtccctattgtgtacagagttcaagctcaaagaacagcaagtctccaagttagatttaagagaggatgtttttcttctcagtccaagggaaaatgtccgagtgtttccttctgaactggagagcatgcgggatggaagttggtttgctctcctgcgtcacatttcacaggatacaactttgaaagtgagagttcatagtttcttatggtaacttgaacttcaaaataactaagacctcagcataccgtgtcttgggcccactgaatgaattagtggtttttagaccatggcacttaatccaagctcctgttaaggctaatacctccgttaaaggtttccttgccaagcagggaaacaagggcttggccttgatacacaaatgagatgaaggctcaagctctcatattcttatccttggctctctgttctttgtagttgaaatatcttcagccacaaagtgctaagggccctgcacttcccaggctgtcttagtactctgtttaccagagtccttctgaaatcacatactttttttctttgcttttttttttttgagacagggcctcactctgtcacccaggctggagtgcagtggtgggatcacagcttactgcagcatcaaactcatgggcttaagcagtcttcctccctcagtctcccaaatagctgggactatacataacctgattttttaaaattaagtttattgttttgagtaggtaagaaataatggccgggtgcagtggctcacggctgtaatcccagcactttgggaggccgaggtgggtggatcacctgaggcctggagttcgagaccagcctgaccaacatggaaaaaccccgtctctactaaaaatacaaaattagccaggcatggtggcacatgcctgtaatcccagctacttgggaggctgaggcaggataattgcttgaacccaggaggcagaggttgcagtgagccgagatcgtgccattgcactccagcctgggcaataagagcaaatctccatctcaaaaaaaaaaaaaaaaaagaataaaaaatacgcaaggtaccagagatgcttcaaaggcaagcattccctccatccctgcccacggcccgtgcaacagcttgattttgataggaaacatgggtaggctgcttccagattccttcactttactatttcagatcctaccagcttcgccaagctcctagataccacgtgttacctattgtgaatcatggatcttggtgtccccatcctgcattcgtctgttccagctctgtcactaagctagtttggtgactttggccagttaacctgcctgacctcagtttcctcagctgtacacaggataataataagcccaatgcaaaggtcaaagagggtttaatgaaataacattgaaagcaaagcacgagaagggagcaccaggagagtggggctcttgtcacgttcattgggtttcacattgagttctccagaagcagaggctgaggcagtttgttgcgtgggatatttattaaaagtcagcacatgtgggagggagaaggggaaggggaggcaaaattgggcagagggtgaagttgaaggacagtgcagctggacaaagcctccctaaccctaggagccataaaggcacggcctttacccctgccatgatcagccattccatggcagttacccaggaagggtaaaggagctcctgtctcgaggctctgctctcagcattcatggtagcaggagcgagcaccaagtccacggatgaggatctctgtggcacatctccctccatggggtttcctgtcaccaacacccagcacacctgggaaagaacagtccacatcttttgaagggcctgggaggtggttcaaataagggttactgttgccttgctgaggtggactagaaatagaacacaagccgcctgactgttgcttttgctttcacagatagctcgctgttgtttttgcttcagtcctggtggagagggtaagcagagcgcttttattctttgcacctgtgtggcactgcagacctataactctaatctgtagtcatttgggattcagacacaaataacttgaatagtaaggagaaagttttattctaaagctgacttactacttatacacttttcacattcttcctgaaggatagctgagttttgtttgtgttggtattctggtagagagaatcagtccaaattttggtttaaatgtaagttaaattatacagtgagatttagagaatcagagagcacattttttaaaaaggagtgatttggaaaataccaagaggtcctgacaccttattttggggccatttcattccttcaccttactttccaaggtggattggaggattccaagggcttgagaactaactcttgttttactctcactttctgctgagcttatagtaagttttacgtctttaagggtttttaagggttctctttctgttaaaataaatgtggcagggcaggcacggtggcttatgcctgtaatcccagcacttcgggaggctgaggtgggtggatcacctgaggtcaggagttcgagaccagcctggccaacatggcaaaaccctgtctctactaaaaaacaatacaaaattagccgggcgtggtggcgtgtgcctgtaatcccagctacttgggaggctgaggcaggagaatcgcttgaacctgggaggtggaggttgcagtgacccaagatcatgccactgtactccagccggggcaaaaagagtgaaactccatctcaaaaaataaataaataaaaataaatgtggcattaggtaactcttcctgttacggaagttgctagggtggagtgggggttttgtgcttagggcacagattgaagttgccagagggtacagatggctttctggcatcttttctactgacagccctgtagaattagcgagcgtgactttgctgaatggtaaacacacacattcactcattgagcctgggctccctctgtgcttcacagacactgaagagcagcagccggggaaggagggaccacgggtcatttatgacgagaagaaaggcaccgtctacatctactcctacttccacttcgtgttcttcctagcttccctgtatgtgatgatgaccgtcaccaactggttcaagtgagtggcccatttgcttaggtatttttgaagcaaagccttaaagttaagagttaagtactgttcgtgtttgtttgtttgagaaggagtctcactctgttgcccaggctggagtgcagtggcacgatcctggctcactgcaacctctgcttcccaggttcaagcgattcttgtgcctcagcctcccgagtagctgggattacatgcatgtaccaccatgcctagctaatttttatatttttagttgagacggggttttgccatgttggccaggctggtcttgaactcctgacctcaagtgatccacctgccttggcctctcaaagtgctgggattacaagcgagttctgagttttaacagtggatgggtatgttttaaccctggaaactggtgatgcttatggcaactttaagaaaatggaaagttagctctatatggacagtctggaaaacatggtaatgaaggaaaaataggaactcctaagcattcatctgcctttcagaaagagaaaatatcccttttttttctacttcaaattttgtgtatctttttccccatttttcttcattttcattacaaaaattggaaacatctttttttaaaatacaaactaaatgtggaattatgaaaagtaacaatgtggtacccccccgcctctacttcccccacacagataaccactgctaggatgtgtatccttctccttttctgtgcatttataaacctctgtagtttttttttgtttttagttggagtcttgctttgtcacccaggctggagtgcagtggcgcaatctcggcttcactgcaacctccgcccctgggttcaagtgattctcctgcctcagccttttgagtagctgggattacaggtgctgccaccacactggctaatttttttttttattatttttagtagagacggagtttcaccatattggctaggctggtctcgaactcctgaccttgtgatccacctgcctcagcctcccaagtgctgagattataggcatgatccaccatgtccagctaattttttttttaacataaatgtcattatacatgttttcccctggaggcttttttttttttaacttggcagtacatgattgacctggccttccctggcactacacagaggttcatactttttctacaggtccacagctttggttgtatcataatttttttgaccactaagttaagcttagacatgtaggctcattgtgcttccttttatcattcattcaacagatgtgcaagtggctcctatgtgccacacggttctatgaggcaggatttatagtccagcaggagagacagactatgacgcaagtcaaatatggtgtgttagatggtgatgagtattggggagaaaaataaaattaggagagggaattggggtaggggtggtgggagtggtgnnnnnnnnnnnnnnnnnnnnnnnnnnnnnnnnnnnnnnnnnnnnnnnnnnnnnnnnnnnnnnnnnnnnnnnnnnnnnnnnnnnnnnnnnnnnnnnnnnnnnnnnnnnnnnnnnnnnnnnnnnnnnnnnnnnnnnnnnnnnnnnnnnnnnnnnnnnnnnnnnnnnnnnnnnnnnnnnnnnnnnnnnnnnnnnnnnnnnnnnnnnnnnnnnnnnnnnnnnnnnnnnnnnnnnnnnnnnnnnnnnnnnnnnnnnnnnnnnnnnnnnnnnnnnnnnnnnnnnnnnnnnnnnnnnnnnnnnnnnnnnnnnnnnnnnnnnnnnnnnnnnnnnnnnnnnnnnnnnnnnnnnnnnnnnnnnnnnnnnnnnnnnnnnnnnnnnnnnnnnnnnnnnnnnnnnnnnnnnnnnnnnnnnnnnnnnnnnnnnnnnnnnnnnnnnnnnnnnnnnnnnnnnnnnnnnnnnnnnnnnnnnnnnnnnnnnnnnnnnnnnnnnnnnnnnnnnnnnnnnnnnnnnnnnnnnnnnnnnnnnnnnnnnnnnnnnnnnnnnttaagaaaagatggagaaggctataattaaaaaggcagataataacaaatgtcgaggaagtggagaaattggaaccctcttacattgctggtttgaatgtgaaatctgctttggaaaagagtttggcatctccttaaacaattaaacattgagttacaatgtaatccagctcttccactactcctgagcgtatacctaagacaaaaagaaaactaggtccacaaaacttacacagcggtgttcatacaagcatcattggtgataatcaaaaaggggaaacatcccaaatgaccatcagctggtgactgcctaaacaaaatgtgctctatccatacaataagatactatttagcagtaaaaaggaatgaaggactgacacatgctgccgcgtggctgagccttggaaattgtatgccaggcaaaaaagccacacacaagagaccatgtgattccttttatatcaactgtccagaataggcaaattcatagaggcagaaagtagattggtgaatgcggggggtgggctgagggggccatggggaaggggagagcacctaaggggtgcatgatttcttttgggggtgatgagaatgtttggaaatgggtagtgttgatggtagcacaagtctgtgtatgaatacattgaaagccgttgaattatacattataaatggatgtgaattagtgaattgtatctcaatatattcctgctttgaccgcggctaggtgtcttgtttccacagctacgaaagtgccaacatcgagagcttcttcagcgggagctggtccatcttctgggtcaagatggcctcctgctggatatgcgtgctgttgtacctgtgtacgctggtcgctcccctctgctgccccacccgggagttctctgtgtgatgatatcggcggtcccctgggctttgtgggcctacagcctggaaagtgccatcttttgaacagtgtccccggggcagggactggcgccctgtgcctgagtgggtctgaaaaagctttgagagagaaaaaaaaaaatctcctgattagctttttacttttgaaattcaaaaagaaactaccagtttgtcccaaaggaattgaaattttcaaccaaactgatcatggttgaaatatcttacccctaggaactggataccagttatgttgacttccttctgcatgtttttgccaaaacagaatttggggcacagcatcttttcacagggataaaaatatcttgtggggccagtcattctcatcctcggaatagaaaaacatgccaaaatcttgagtccccagcgcctaacagaatccagacccctctcactcacttccgcctcttagagccttgtccccagggggctttgaggacaggactcagcctgcagggcccctggtatttatagggtccaagaggaggcacctgcttttcaactgcaccctcagtgctgcctcttcacggcccctaaacgtttccctttgaggttgtgatgctgggaatcacagacttcactctctgcctgcacccttccccgaggtctcatcttttctgggtcccacatctttgtaataatgtgaaaaagcacaatttgtctgatcaccccccaggtggttccccaccttattatcactacctgatccgagttactgcaataagtacggcgcttatttatggtgttattcacatgattatagaacaagattcatgttttctctgcctaagcaatggagggctatcattcttacttgtttgtgctgttgataatgataatacttttaggaccttaactgaaaagctgcttcgtgttgaagcctgctgcatgcactgctctttcagttgttgaggtcagcccctcagttttttctccaccttgaggcctttgaaactgtaaaagcggaagtcgttttgtgttctggatctgtaacgtgaccataccgttcaggttcatgctggcatccttggagtaggtttgctaatgtgagaatttctgaggtgaggatctcagacacactgaccagaagaagcttgttaggcaatgtgtggaagtggccgaatatacttaaaaagaggtgggcagaggcaggcggatcacttgaggtcaggagttgcaagaccagcctggctaacatggtgaaaccctgtctctattaaaaatagaaaaattagccgggcatggtagcgtgtgcctgtaatgccagctactcggaggctgaggcatgagaatcacttgaacccgggaggcggaggttgcagtgagccgagatcacgctgcacaggaatttccaaaatacgtacttgcaaagtaatacagaaacgtgactttcggcagctacccaagatgatgcctattttcagtgttgatgtattcaggcagggaaaaggtttacttggtggaaactcctgttagaatttcattcggggtggaaagaatcttctcgagctctctgtaagtgaggatctaagaataaaaggctcagcctagtcatttttttctgtgccctactgtatgagttgggcagaattgagtgccacctaagctgggcttctgtgtgccaaaatgctggtgggtgaaattagtgaaattctttctattcattcctttgcccttctcccaagaaaacccatggggaaacaaattacaggggatgaattcctttagaactttccctacttagagtgtttgagattcagtttcaaaaggcactccatctgtgtgtgtggtttagagagccttgttttgtaaattccattaaatttccttttttagggcaggagctctgtactcagcagttaaaagattcatctggagtcgcaaaatgaaaagccgtgttctaacctgaggaatcagttaggggacaggagttccgtgggccaggaatgggctcagggagtggggctgcgtgtcacacacagtagctgtgttgcagtggcctagggccttgggggttgtctttaggaaacaccctgaggggaagcaggtaaagagcctgggcagtattgtgactagtttcattgttttcctcctgctgaggtctagcagagcccttgctttgtcctctcggctgggtctggctgccagctggtgtgatttgagaaactgaccttacgcgcagtcaaggtccagctgacaaggccttgtattccttggctggccgtgattggccctttcctctgcagaaagcagcttagggaagcccaagcaagggagtgtggccggtagaaggccctcgtcgcttccttctggagccagcccagccacacaacgttttccagatgcgtgagtctggtttgtgacatcccgttcccttctgccggttggtctgatgcaagaggaagagttacagttgctctgaattttattctcagctgaaaatgttagcacgtgtatctggatgaacaaaacagatgtggatgtatctgaggattgagggactatcaatgcagagttaatgttaatggttattaattgtgatatacaatactcaggtgaggagtcaacattcctggatttaaagaatctacagttttgtgcaattgtgatttgagaaactggaaacattgtgccaatggctttgagttcctataacaacggtgttaatttgattaactcactgatatcttttaaaaataatagacatttgcttcctacacctttttgtacatgacctaaagagtatattcccagaagctgctggtcagacacatttagggatgacagttgaagaggacttttttaaagctgcatgtgaatatttcctctgtgtgatttgtctgatgtagaaaagttttcccctcatttttatgagtaaaaacactaagtgggtggcaggggggtgggggttcttatgggagtgtcataccgcggcatgttacctgactggagactagagactatttccattataagccttcagaaacccaaccacgtctttactgtgtctagctttttaaatactgattggttagttttatttttgcccacagtttcttgggcaaaaaggttcttcattttgtctgaaaaagaaattatttgccagaggtatttggagcctctttgaaggggagatagagtgggggtgggttgtggggagggtggagttattggggttttggggttctgtttccatacaacattgtttatttccgattcctcagaagatcctttattatgaataacctcagtgtaatgttaatttcctgtccccatgtcaaaattgtcaccctaagcctttttttttttttttttttttttttttggagacgggctcactctgtcagccacgctggagtgcagtgacatgatcttgactcatggcaggcttgacctcctgggctcaaggaccacctcccaagtagctgagaccacaggtttgccccatcacacctggccgatttttatttttttgtagagatggggttgtccaggctggtctcaaactcctgagctcaagcaatgtgcccgccttggcttcccaaagtgctgggattataggcgtaaaccactgcacgcagcctaccctctgcctttttaagatgatgtatttatttaatttttgccatcattggtgcttcaccttcctgcgaaggaaattccagagcctgtatttaagctacctaggcttttacactccctttattgcctttccaaatagtatctcatttggtgtactctagtgtcctatacctcttggaaacgaaagagggcccaacctacaactaagaagggacaaaccttgaactaagtaagaccttacacacccagaaagaacactgggccctccttcttcagggacaatgcagtagccacttggcttgtggaatttactgaaggctatttcctgtaacttgctagttaacttagttttgtatttcaggcagaggtgcgctctgtaatgttgggcctttgacttcacagtactggagagctgttcacacagatgtttagacctttctctctctctctctctctctctctctcttttcttctttctcaacaactctttcacagaggcagtcattttgaaaggttgaaatatttggcctttaccaaagagctttttttttccttaagcaaaatcctttcagaaagaaacaaatggggaagggcagattaagaatgcatatgtcccaatccacttctataggagtttaatcatattcacatgagtaaaatgatggaagaactctttaaggtaatcctttgggataaaggatcctgggaagttctctcaggtaaagaaagcttacagcagatttgtaatatatgtctggagagctatttataagaaatttaagaggattgttttgttttcctttattaaagatttaagcctttttactttgcaaaaagaaaactacaaaagttttatagatataactttgctaattttttaaacttttctgaaacgattagctgtagccaaattatgtggttacgttttgctacattagaatttgaaaatgcaatatgtgtggtaaatctactgtttgaaatttataatggtctctgatatgattcgaattttggtaacttttgaaagttattttccccctttagtcatggatttctatttgttttttaatgttaatttttctagaaagcatctgaattgactaggcttttcctatataaaaaactcaaaacttgttaactctgtactttaataaaatttaaaattaaaactgtgttgtttttttctcttctgctagatacatatataattaaagtactcaagttagttgttttgcagagatgttgccttcagatgttaatcaggtctctcaagtttcatggagtctatgctgatcctttaattgacaaataaaagatatatatctgtggtgtgcaacatgatgttttgaaatatgtatatattcaggaatagccaaatcatgctaattagcatatgcattacctcatgtttttgtgctgagaacatttaaaatctactcacagtaattttttttttctgtttttttggagacagagtcttgctctgtcacccaggctggggtacagtggcgcgatctcggctcactgcaaccaccgcctcccaggctcaagcgattctcttgcctcaacctcccgagtagctgggattacaggcatgtgctatcatgcccaggtaatttttgtatttttagtagagatggggttttgccatgttggccaggctggtcttgaactcctgactacaggtgatctgcccacctcagcctcccaaagtgctgggattacagacgtgagccaccgtgcccggcctactctcagaatttttaaggtacagtgccaggttcctaactctagtcaccgtgttacacagtagatctcctgaacttctggctgatattttgtgttctttgaccaacatcaccctgaactcccccctcgcccagtcccccacctccagcccctagtaaccacctttacactctgcatctcttaagtcaaacttaggaagtttgactttttaagatttcatggatcagtaagatcatgaagcatttgtctttttgtgcctggcttattttacttagccgtgtcttctaggttcctccaaattgttgcatattgcaggagttccttcttttgaggctgaattttttattgtgtatatataccacttttcctttttttgagacagagtctcactctgtcacccaggctggagtacagtgacatcatggcttattttggccttgacttcttggactcaagcaatcctcctgcctcagcctcccgagcagctgggaccacaggctacaacaccaagcctggctaatttttgtattttttatacagatagggtctcactatgttgcacgggttggtcttaaactcccgacctcaagcaatcatcctgcctcagcctcccaaagtgctgggattacagacgtgagccactgcgcccagctcacttttttttttttttgagttagagtcttgcttggtcgcccaagctggagtgcagtggcatgatctcggctcactgcaacctctgcctcccaggttcaaggcaattttcctgcctcagcctcccgagtagcagctgggactacaggtggccgccaccacacctggctaatttttgtatttttagtagagacggggtttcaccatgttggccaggctggtctcgaactcctgacctcatgatccgcctgtcttggcctcccaaagtgctgggattacaggtgtgagccactgtgcctggccacatattctttatattcatttgtggacactcgggctgattctatatcttggccattatgaataatgctacagtgaacataggggtatggatatctctttgacatactgatgtcattccctttgggtatatacccattagtgggattgctggatcatatggtatttctactttcaggtttttaggtgttttttttgtttgtttttttttttttttttttttgagacagggtctcagtctgccaccccagctggagtgcagtggcacgatgtcagctcactgcaacctctgtcagcctccaggttcaggtgattctcccacctcagcctcatgagtagctggggttacaggcgcatgtcacaatgcctggctaatttttgtattttttggggtagagatggtttcgccatgttggccaggctcgtctggaactcctgacctcaagtgatctgcctacctcggcctcccaaaatgctgggattacaggcgcgagccactgcacccagcctgacttgagcactttttcatgtatctgttggccatttgtatgtcttttgagaaatacctattcaggtgctttgtcaactttttaagtgggttgttttcttgctattgagcagttttgagtttcttatatatcttgaatattaaccccttatcagatgttgtttgcgagcattttctctgatgctgtaggttgtctcctaactttgtggtttcctttgctgtgcagaagcttttcagtttgatgtaatcttgtctacatttttgttgcctagctttagtttcgggttttaacagctaagtctttaattcattgtaagttgattttttaatatggtatgaaataaaagtctaattccgttcttcaacatgtggatatccagttttcccagcaccatttattaaaaagacattccttctcccattgttgtgctaattgttgagaatataaatatgaaaccccgagcttgtcttcttcctctgaaagctgtggaccgcacttcctttttcctgcccttatgctggtgacaccctgtcctgatatatgagaattagagtaaagcatttttttttgtttttttgagacgaggtctcttgcctaggctggagtgtagtggtgtgatcgtagctcactgcagcctccaactcctgagctcaagtgattgttccaccccagcctcccgagggcttgggcctacaactcctgctctcaagtgagccttctctcttggcctcccaaagtgctgggattacaggtgtgagccaccacaccgggcacttaaccatttttaggtgtacagttcagtagtaggaagtgcatagaacattcacattatttggcagccaatctccagaactcttcaatttgcaaaacaactcattaaggaactccctgttccccacttcccctctcctgtggcaaccgtcatcctactttctgactctgaattcatcatttgcttttttttttttcttccctctgcttcttcccacatagatactgatagtcttcagctctcccagcttttgatttttgattgtgctatctagttgctatttttatgtagcaattcaggaagatccaaaaactatgcttctatcattgcccccatctcttccattcacacttgaactcgccacaataaagctttcacacacttaaattgaaaactgcttttcgaagtcatgggtgacttccatgttgccacgtccatcgtccttactttacttgacctatcagaagcactggacactatgaactgtttaaactgcactgcaaaccttattcagatttcatacactcatccttactttttgaaagggattctctattgtagttatctttttcctcctcacattgtacaaggaatgtgggaggcagataacttgtctttttagttcttgggtccctgcacccacagagccatccctgtggagccttatccacacacagctggacctgatttacttcctaactccaccttctgggtcggccttcctttactatttgaaaaagcgtgattgggcctggcgtggtggctcatgcctgtaatcccaacattttgggaggctgacgcgggaggatcacttgaggctgggagttcaagaccagcctgggcaatatggtgaaaccccgtctctacaaaaaatacaaaaattaggcgggcttggtggcatgtgcctatagtcctagctactccagggaggcagaggttatagtgagttgtgattgtgccattgtgctccagcctgggcaacggaggagaccctatctcaacaacaaaaaccctgatttgcagccaaatagtttcctcagcctatttcctgccagtaaatggttaggagcccagtggctttgttttgaacagtctttgtccattttagtccaagctagtggtgcttgtgttagttcagttctcttaaaaacattgtgagttttctgtggattttactgggattcactgtgttagataaaaaccatctccaccaatctttttaagatacgctccctctctggggtgcatgtcagggtgctgtgtgagaacacacttgttctttcagaagcctgtttgtctaactaaccatgagggtttgagaagcaattccttacatctttctgggattttaacaaagggcctcatgttgaccagaggccacgttttacttgtggcatcgaaaccacctttgcataaattataactgagaggattatgacaatgaaagagatgtgacctaacttactgatttgttcctaacctccaagctgtccttgttcattcctgggtgtaggctgaactaattttggaaggaacttaacttacagtttaactttgttttttgttgttgttgtttattttgttttgttttgttttgagacagagtctcactctatcacccaggctggagtgcagtggccccatcttggctcactgcaatctccacctcctgggttcaaacgattctcctgcgtcagcctcctgagtagctgggactacaggtgcacgccaccacgccagactaatttttgtatttttagtagagacagggtttcaccatgttggccaggctggtctcgaactcctgatctcaaatgatctgcctgcctcggccttccaacgtgctgggattacaggtgtgagccaccacgcccggcctatagtttaactttgaaacaaagatggtaccagccctttccctgaacaaacacccttttagcctgggaactataaactgcctttgcaggactaacaaattagctacaagattagaaattgtggtttaggagtcatgcagctggaggtggcaagattctaaacccctccaaattgctcctccagataacaggtattttggagaccctgcactcgatggatcagctgtccctaaccagattgataaattggttcatctggtcttgtggcccccacccaggaactgactcagcaccagaggacagcttcaactccctgtgatttcatctctgacctaaccaatcagtagtccccactttctgaccccctgcccaccaaattatccttaaaaaccccatcccaagtctttagggagactgatttgcgtaataatacaactccagtctcccgtacagatgactgtgtgtggattaaactctttattgtaattcccctgtcttaaattgagtctgcctaggcagtgggcaaggaaaattcgttgggcggttacagcatcttagatttgttctttgcctccaagttttattttgattttagaacacgctgctaactgactcagacagtcttgggccctctatattcttctaaa

SEQ ID NO: 1714 - DNA, 1361 bp, Homo sapiens
gctgatcttcgttcaagtgtgagctgcggctgagcccagcgctcgaggcgcgaggcagccaggagggcccgtgcggcgcggggagccagcgagcgcgccttcggcattggccgccgcgatgtcagctcagtgctgtgcgggccagctggcctgctgctgtgggtctgcaggctgctctctctgctgtgattgctgccccaggattcggcagtccctcagcacccgcttcatgtacgccctctacttcattctggtcgtcgtcctctgctgcatcatgatgtcaacaaccgtggctcacaagatgaaagagcaccctggcgctatgtgggagccgtcggaggcttcctcttcattggcatccagctcctcctgctcgtggagtttgcacataagtggaacaagaactggacagcaggcacagccagtaacaagctgtggtacgcctccctggccctggtgacgctcatcatgtattccattgccactggaggcttggttttgatggcagtgttttatacacagaaagacagctgcatggaaaacaaaattctgctgggagtaaatggaggcctgtgcctgcttatatcattggtagccatctcaccctgggtccaaaatcgacagccacactcggggctcttacaatcaggggtcataagctgctatgtcacctacctcaccttctcagctctgtccagcaaacctgcagaagtagttctagatgaacatgggaaaaatgttacaatctgtgtgcctgactttggtcaagacctgtacagagatgaaaacttggtgactatactggggaccagcctcttaatcggatgtatcttgtattcatgtttgacatcaacaacaagatcgagttctgacgctctgcaggggcgatacgcagctcctgaattggagatagctcgctgttgtttttgcttcagtcctggtggagaggacactgaagagcagcagccggggaaggagggaccacgggtcatttatgacgagaagaaaggcaccgtctacatctactcctacttccacttcgtgttcttcctagcttccctgtatgtgatgatgaccgtcaccaactggttcaactacgaaagtgccaacatcgagagcttcttcagcgggagctggtccatcttctgggtcaagatggcctcctgctggatatgcgtgctgttgtacctgtgtacgctggtcgctcccctctgctgccccacccgggagttctctgtgtgatgatatcggcggtcccctgggctttgtgggcctacagcctggaaagtgccatcttttgaacagtgtccccggggcagggactggcgccctgtgcctgagtgggtctgaaaaagctttga

SEQ ID NO: 1715 - protein, 304 aa, Homo sapiens
WRYVGAVGGFLFIGIQLLLLVEFAHKWNKNWTAGTNKLWYASLALVTLIMYSIATGGLVLMAVFYTQKDSCMENKILLGVNGGLCLLISLVAISPWVQNRQPHSGLLQSGVISCYVTYLTFSALSSKPAEVVLDEHGKNVTICVPDFGQDLYRDENLVTILGTSLLIGCIKCLTSTTRSSSDALQGRYAAPELEIARCCFCFSPGGEDTEEQQPGKEGPRVIYDEKKGTVYIYSYFHFVFFLASLYVMMTVTNWFNYESANIESFFSGSWSIFWVKMASCWICVLLYLCTLVAPLCCPTREFSV

SEQ ID NO: 1716 - DNA, 47438 bp, Mus musculus
  misc_feature (1)...(47438): n = a, g ,c or t
ctggcctgagagacctggctgtcgctgcctccccggctcctccggcttcttcccgattcgcctcaggtcgctgtgcttgtatggaaagcactgattgactgagccatctcctcagcctgtgtggggactttttttttttttaatatttttaattttttaaaagatttatttatttatgtatacaaatacttggcatgtatgtctgcacaccagaaaatggcatcggacaatcatgagttgccttgtgggtgctgggaattgaactcaggatctttggaacagcagtgactgcttttatcattgagccatccctccagccctgtaaacagaggttatttatttctttattttattctaatataaactcgcattgttttgtgtgtgagttgcttaggatgctcttttcatcatttctaatttactttttttaaacattttaaaaaacatttatttattttatttatgggtccactgtagctgtcttcagacacaccagaagaaggcatcagatcccattacagatggttgtgagccaccatgtagttgctgggaattgaactcaggacctctggaagagcaagcagccagtgctcttaacggctgagccatctctccagccctttaatttacttttttaaaagaaaaggaagttgattttttttacccccaaaggttgaaagtcagttctggcttttcttttttcatggaagcagatatgattgagttctagttagtgaaggctaaactacaaatctgttggaggaagcagtgtgtggcgcgatgctggcaaagccttggtgctgacctcgcaggtcttccaggcctctgcagtcgcctcttcataatttctgatgacgtagcttgatatttccattaatagcaatgatcacatggattgttttgctcattttccacaagacccttgacagacagatgttcatttgataaaataaagccttgtgtgggtgcctgatctttatcaaaagtaaacgatagtgtgaacttttattcacttcaactctggaggcaacatagtagtgagtcagtcaagtggaagagtctagaggagaagcttggcatgccggagaggagagagtgaagcccgccttaacccttaacgggaatagaggaatagtctagtctgatgtgtccttttcagaattgcctgtaagtcttggctgatttatggcacccatggaagggaattgagcacagtagacttggaaggaagtgcgaacaggactgcagtatcaacatttactgtgtttgtatgcatgtctgtctgtctgtatgtctgtctgtctgtctgtctgaatgtctttatgcatgcaattagtttgagacaagctttgctgtgtactcctgctagcctgcaggttgctttatgtatcagcctgcctctgcttgtgaggaatcctcctgcctcagcttcccgggtgtgtgtggattttgtaggaactgggccatgaaacacaacttaagggggagggagtgaaaagatttctaatctgtgctgctgacccctcctgcccccaacacacactttgctttctttttcttttatctgagacatgctatcactgtctgcctagcctggaattcactgtgtagaccaggctggcctcatgatcctagtgatacatctgtctctgccttactggtgcaaggctcgggctatgtgccatcacccccccccccacacacacacacacacatttaactttgttatttcttatgttagacaagttttcttataaggttttcactatggggtaaacttaatagtcataagaaacagaaccaccttttttttttttttttcttattggaaaaacaaggaatttgctttttttctttttctttttttttttttttaaattcaggagtataatttagattattttactttctaaaaaaaaaaaattagccagacagtggtggcgcacgcctttaatcccagcacttgggaggcagaggcaggcggatttctgagttcgaggccagcctggtctacaaagtgagttccaggacaggcagagctacacggagaaaccctgtctcgaacaaaccaaaaaaataaataaataaattaaaataaaataaaataaaaaaattatttgtttacctattttgaggtgagatctctcactgtagccctgggaagctttaaactcagtaattcccctgccttagcctcccaagtgctggtattacaaacatatgctatcattcttgggctaaaaatttgttttaattgataaataagtgcatgtatttagagggtaccttgggacctgtagatagaatgatttattaagctaactacatatctgtaacttcatatacttatttatgggcagtgacatcgtttgggatgcctttgggagagtctaaagtatgttattattaaccatggccactctgctgtgactcgaggtgtaactcagggtgctaggtctcacagcctggcccttcctcattagcataggtatctttgattgacttctcctgtttgcttcccaaggtccctagcttttggtgagtttctactctttgagtgttaaactcttaacagttactacacagaagagacgccggggtgtgtttttcttcctatgctgagcttatctcacttagcatggcatccttctgggcctattcatgttattgcaaatggcagcattttcatttatttatttatttatttatttatttatttttattagatattttctttatgtacatttcaaatgctatcccgaaagtcccctataccctcctccccccccccccccaaccgccctgatcccctacccacccactcccacttcttggccctggcattcccctgtacggggcatataaagtttgcaataccaaggggcctctcttccctgtgttggccgactaggccatcttctgctacatatgcagctagagacatgagctctgggggtactggttagttcatattgttgttccacctatagggttgcagaccccttcagctccttgggtgctttctctagcttctccattgggggccctgtgttccatcttatagataactgtaggcatccacttctgtatttgccaggcactggcatagcctcatatgagacaactataccagggtcccttcagcaaaatcttgctggcatatgcaatagtgtctgggtttggtggctgattatgggatgtatccccgggtggggtattctctggatagtccatcctttcgtcttagctctaaactttgtctctgtaactcctttcatgggtgttttgttccctattctaaggaggaatgaagtatccacccgttggtcttccctcttcctgattttcttgtgttttgcaaattgtatcttgggtgttctatgtttctgggctaatatctacttatcaatgagtgcatatctaatgacttcttttgtgattgggttacctcactaaggatgatatcctccagatacatccatttgtccaaatttcataaatccattgtttttaatagcttagtagtactccattgtgtaaatgtaccacattttctgtatccattcttctattgagggacatctgggttcttttcagcttctggctattataaataaggctgctatgaacatagtggagcatgtgttcttattaccagttagaacaacttctgggtatatgaaatggcagcattttcaaaaagatatgtgtagttcctgaaatgcgctcataaaacagaagttacagaccctgtcttagaagataaactactcatcagttagaaggataaaatatgaatgccatctgcactcttaaatattcagtcatccatgcaaatagcaagatttcttggcttaatggaggtagttatcttaagacatgtgtagactgtcactgataatattgcttattatgggatgctttggcgtgatttgaataattatggcactagactaaagatccattgattcaaaatgggatacaggcaataggcattcctcttaaacgccccttgagctccttcattgtatttctatctttaaaacggtttgcaaaaccacttggatatttagaatggatgtgtttagatggaatgttttcatgaatttgatttttttcccttgtttcagatttagtggagttcaatttgggcagtcccaagaatgtcggtcccttccttgcagtggaccagaaacacaacgtcttgctcagctatcgctgtcatggtccacccattcgcttcacgagcgtctttagtaatgagctccattacgtggcaaatgaactgaacaggctcgtgggagggaagaacacagtggtggccatagccgtatggtctcactttagcacgttccccttggaagtctacatccggaggctcaggaacatcaggcgggcagtggtccaactcctggaccgaagtcctaagacagtggttgtcatccggacaggcaatgcccaagagctggggcctgaggtgagcctttacaacagtgactggtacaactttcagctggacactgtccttcggaggatgttttcaggggtcggagtctaccttgttgatgcctgggagatgaccttggctcatcacctaccccacaaactgcatccagatgaagtgatcgtgaagaaccagctggacatgttcttatcttacgtatgccccttggagacctagctgtcctcaaggacactggagcaatcacgtccagtgacctttccaattgacctgcagcatagataatctgtgatcgactccattgcgaaatggatactcccaatcggtttgccattcagaaaagagctgtcctttgcataatgactggtaatgaacgtaggcagtgtaggctgcgtttgtagctacctataggatttttccgtctcgacttagccatcctagagatctaacttattgcatctgcacacggtattgctgcccttgtaaccaaagatgctaatgagtggttaagaactggcttctcgggggtgagggtgggggtgggggtgggggtgacatgctgatgccatttaagagatgctttgatgtaaacagaagggatagatttggttggcagtgctatgtttgccacttactcgataaagggcatttgaacaggtcttcatgaatgtgccctcctcaggaatagagagggattcttgctagaggttcctgtggccacaatgaagactgttgtatctcaggagtttctattgacttatttatttattttctcaatcacttgtaaaggccaatgtgtgtggtcagaattttatatgaggatattatcaagttcctgcttttatctcaaaagacgtccaacgaaagagcacccagtctctgctttggattggtatgggcactggagaactatttcttacttgattcagctgagttttatgtgatgaattcttactctggaatagccacttttggaagcgactgtgtaaatagaagtttatttttatgtcccgaagcttgtgggttttaagaactgactcttatgttaagaatgctgctcactctcagaaagttgtcagggtttctgccctcagcagttccagctgtttcccctttgctttttggctgtcatgaaatatatgccgaaatcagacgtgaaaccagatcagaagttaataaaattagatattaaaactcatgacaagtatttcttgacttgggcataaagtctgcatacccattgtctgtctcatgcttgcatgtaaggagccactattgagctatctgctatttcttctggctttttggactgtggttcaagtctagggccttgcacacactaggaagctgtgtctaccaactgaattacattcctagcccatttctggatacccccaagatacaaagattggtcattttattggacgttgtcttattaatattaagtggttttaaattaaatttaggatcatctaataagtagtttttgcattgtgagaggttataagttacttctgctttctttgaacagacctgcataaacactgggctgccttgggaaatgaagacagatgctaaagcaagaaaaatacacatccttcagaaatgaatagtttgggcttttaatgcaaaggacttaagttgaccctttccttctcttgggggccgttaagtttataaactattttgttttaagtgtataaaatataattgcttttggcgtttaggaccagtgaagttaaatgtattatgctagcttagtttttgcaatactgaagcttgatctttgtgggacactgtgctagatacggagtggaccactgagctaaacctccagcccatctgtctgtccgtccgtccttccttccttttgtcttttaaacttttagaattttaagagaaggtctccaaaagttcatagactggtcttgactttgcctacacaggctttaaattttcttccttcctaccttagcctctccagtaactggacctataaggctgtgcaatcagcctggttaaatagctcattttaagtcaggtgtggtggcacacacctttaataacagcacttgggaggctgagacaggtgggtctctgtgtttgaggctagcttggtctacagactgagttccaggacagccagggcgacacagagaaaccccgtctcgaaaaacaaaacaaaaacaaacaaaaaagctcattttaaatggccttaagtttgcagtatttgataaaaacgagttagggaccatacctccagggattatagaattaatcaccttcgtgacaaatggccaagagattctagtgcagtcgtagggctccacactttgagaaacagtgacaaaggaaagattgatctagagaagtaacattgcttatctattacttcaaggcgttatcaagcgcttaacgctggccgtgatttgatagtttaggtgatactagtcccattcctgtaccggaaggactcaagtcagaattgaactcaggtacacagagtctgtgccctgcctggctacaactgctttggcttgtgtaaggatgtgctgggctttgagacctcctcaacccttccgtgggaggcagaatcagaagagtttctttcccagtgaaatttcaagcaccgctcaccattggttcacagcgattggtctccatggctgatgccttgtgacctttttcagtatttgcctttcagcttggttgcacaaggtcttgacaatttgatagcacggtctcctgaagtcctttcagtcacctttatctctctttggccttttacactccggtgtggaaatttttatagaagctaaaatattacttaaatatgtcccagagcagttagacgcaggttgagcatctctaatctgaaaaccccaactccccccaaatctaaacttttttgagtacttgacatcacaggtaagaaaagcttcacctcacattacaggatgggtcgcactcccaagacagctgtggggatggggagatggctcagagtccagtttccagaggaccgagtctgaatcccagcctccaagccaagtggcttacagacgaccagtaactgacactctagatgggtccagagcctcagtgtgcctgcatccttgtggcattcgttcacactgacacgcagaaacacacaaagagtaaaggccaggtgtggcatatgctttcaatcccaggacttgggaggtagaggcaggcagatctctgtggactcaaggccagccttgtttgtatagttctatactaaccaagagttacttggtgagacactgtcttaaaacaaaacaaaacacccaaatacatgcaatgaggataaaaaaaaccttaaaaatatttttcagaagccagacatactaaatgttatataacattttcttcagtttatatatgtaaagtatatataaggcatacatttcctacttaggcttgttatgcattaatgagttatatacatatatgtgcatgtgaatctatacacgtatacatacatacacacatgtacacacatgcatatatatgtatgtatacacacatgcatatatatgtatgtatacacacacatatatatgtatacacatacatatacatacataaatattcctgagtctaaaataatttaaaatcttacagttctggactcatggacttcagacaagggcttctgaaacttatgaaaaatttattatagattagttagtcccatatacttgtgaatgtcagcatgccagataaaagtgtttaaatacatatttcttataataaataaaaagggaatcataattaaaaaaactacacaggtttaattaaggatacagtctagctgagtacaatgaatattagcattttgataggctttctttctgtttttttttttctttttctttttaagcatatgcaactgatcctctttatctctaggctccatatcactggcttcagtcaacttccgatacaaacatttgggaatgtattgcacctgtactaaacatgtacagacttttaatatatcattgttctctatgtaataataatgaagtataacatccacttacataacatttacatattatcaaatatactaagtagcctagaaatgatttcagatatatgggaggatgttgcttcttatacccaaatactgtgccatttttctataatggagttgagcatccctagattataatataattaatcctagcacccaaattgttggagttagaatcatagaggacatgtaatttgggcctttaaaaaattgaacctacagtttaaatatttttatatgttacatagccttaataattataaaggtctgcctaaaattgtactatctagtaatagttttactatgtcagttggccattatggttggatgtttgggcttgtaacaaaatattaaaatagatttacatacatttttgttgaaataaagtatgagtttgtggggctggagaaatgggacagctgttaagagcagcaacttctcttctgtttcctctttcaaagtgagtggggagtacctgagtacagggggcacttgggaatcctggggtagatggcaggtggtagaggaccagagagctattgaggcagaagtttcagacacagaaactagggtttctttaaaatcttataataattttaaaaattaaatggcattttaaatacagatttttaagcatgaagattaagagaaaaagaagtgctcaagaaaaaggggtcaaacctggccttctctgagagagaattgccagaaactcattttaggatatttaccctttaaaatattctatccgagatgcattacacacatacagaatttccattattattattattattattattattattattattattattattattaatcaaacgagaggtagtcaggtctcttgagctttagggatctgaactgatgatgtagatgaacacaatattcttgctgccccaataggacagcgggtgtttcctacgtaatcacaaaactagactgtgacaacgaatgcctggacatgatgaaagaagagaagaaaaaacggttctgaaatcactgtaatgagggttccaaaactgagcagcgaaactgcatgctgtcaggagaaaccccttcagtgttgtgcaatggcaggcagataggaccactttcccatcacttttgcctgcagtcattcagttaaggagccctgcttcatttatggtggcagattaggaatacacaacagagatgccgctttgccatgctcaccaaactcaaccgggggaagtaatcctccagtaatcctccagaccggtttccaggcctttgaggtcacaatgaaaacatgacagtccctgaggcgactctaacgaggagccataatcccctagattcccgggacactgggacaggagtcctgaaaacagctctgcggggcctcagtcctccgcgcggctccagtccgggtcttggggaccgccctggcggggaatgtccgggactcgggtcggtgtctttttggcctgggaatttccagcgtgtggaaaaagtccacaaacttagtcctcgctgcccgcctcgcctcctccggcccttctcggtgcccacgcacccccgatcgaacccgaggatgagcatagggtgtattttaggcgtgctgggcttccccgccccctctgcccacttagctggcaaaaagaaagccagccctataaaggaggccagggccaaggactggcctcctcccgccacgaggtcagacggcgagctctagagaaagaggctgcttaactgttctttatcatgtaacctcaaaaggaaacccagccgtcttctgatgctctcacgtacttgggggcattgtcgctgcttacagctgaaagcagttgaattgcttttacgtatttgtgtgactcgaatcttcaaatacaaaggtatacttttattatttgatgttcaatatgaaaagggatctaaagagctaagctgccctcaacccgttcctttcccatgctctttccttgggagctagatgtctgctgatttataaagtagtaacatttgctttgtggcaaaatattgtggggcagtggtttgtttgttgttttggggatgcaggatgctatgatatcttggcaatagcttgagttgtatctgttgcctataaaggcccaggaagaattaggataccagtggagggtacatgtggtggctgatgaagatgcttgactttgtatatctgatgtatgaatttaccttaagctggtgatggaaaatggtggctaccctaaggtggaagttttccgggaggtttgatgggtgggtttaaaggcttactttctcataaaggtaaacatgaagctacaggttttgttttgtgtatgtcttttttgtttgtttgttttgttttgtttttgacagggtttctctgtgtagcctgggctgttctggaactcactctgtagatcagagttgcctcgaactcatatatcctcctgcttctacctcctgagtgctggaattaacggcatgcaccgccacacttggctttatgaaactgcctcttgccgggtggtggtgacacacgcctttagtcccagcagttgggaggcagaggcgggcagatttctgagttcgaggccagtctggtctacagagtgtgttccaggacagccagggctatacagagaaatcctgtctcgaaaaaccaaaccaaaccaaaccaaaccaaaccaaaccaaaccaaaccaaaccaaaccccccaaacaacaacaaaacaaacaaaactgcctctttgtggaaaaatatattttgagtaggttgaagtatttgatagcatatcctaggtagttctcatatcacctctataaaactaaaatttatgaatggccgttttatgaattagagaaaccattgagctggggatggcttggcagaacctatagcttcataaaagtttaagagatttgtccatgtgaatgcatgtttctagatgggatggattagaggttctctatgctgccagccctagtgaactgactgtatcaagcaaaggggctggcccagagaggatgtgacatttattatgtaaattttaagaacttggcattacactcttaatttgaatctggcctctaaagaaataagtacctggtcgggtggaatggtttgtttgtttgtttgtttgtttgtttctcttagtataatagttctctacctgtgggtggcaactccttaggaggggttgaatgaccttattgaaggggtcacttatcagatatttgacatatcagatatttacattaccattcaaaacagtaacaaaatgacagttatagagtagcaacaaaaataatgttatggtccagggtcaccacaacatgaggaagtgaactaaagggtcacagtattaggagcgttgagagccactgttggacaataggttgtctggataacaaaatagaaaaaaatgtccagcgcccatttactgcagtagttatccctgatacagaaaagcttaagcaacatctcatggaaacatgtttttatttgacttgagaatacaatgtgttttctactccctccagcacctctctatcattttgcaggttagggacacagctggtcagggtacaggtgacaagccctgaagagacagaagtcaatctaggatgagtccccgtaggaagtcagtgcacaatcatgcacttggtggcgttctgcctagggtacaggcaatgccagggtcagcataactgctattaagatactgatccttttggcttatgaaggaaaaggggacaaacctgtccctttctttcctttgtcctgacaaagatacacagacagtaaccttcccagaagctgcagtctccttggaccctgatctccagggatgctttctgattgttcagagaccacgtactaatcactcctgaagactgtttccttttggctatggactgacactgatctggtggcctcttgctctcttgccctcagcttaccaagaagatcctgaggcccatgctgaacttcgccttttgatgttggctcgatgctgaagtcccgagggtaagtgggtgaatgtttctaagtgggatctaagcattccttctgtcttgggtggtattgtcagtatgggaaatggatgttttattcggagagttctaaggtttgcaaagctcttaatttaaccaatttttgaagtttacttacaagcagttaattatgacttatgaactaaaagtttttggtgttttttttttttaacaaatatttgaatttcctctgtttttatgggaggaggccatgaacacatctaagaggggaatccagccctcagctgactgacagtttcagaattatgaaatctttcacaggctcagagagcatcacatctgaatggtgggtgggtgaagaaactcatttgagctcacatctgtggtttctgatcaaagcactttctgttccttcagtttggaactgtgagccccacccccacccccacccccaccccaagtgtctcatggagcaaatactggacttgactatttgtaaacacttgttttaggagctgaacttgcaagagctcagctttccctcacattaccatttgaggtacagtgtactcagctatatttcctagacccaggagaactgagctgttggctcagagtctcccagatagaattcagaacctagatttgccaccaggccagtgacacgaaggtaccaataggagcaggcagctttccccccaagaactcttctacttctttgctgagtcttggctaccacatactctctgttcatagttaactgatgcagtccttattgataaccaccatgataattcacatatgaaggagaccacagggaagtgttttatacctcagagagtggagccacaggagggtggctgcctgccctcaggagttgataagagctggccatttactttctgtgttctttttggaaacagtaacagagattgtagagtaggtatcctgtcaccaatttccttttgcccctctcaggaccttttcttctcgaacgctgggaggacattccgcctcccccagtacagcatccattgctgatccctatgaggaagggagccttgggtagccccacccatgtgtctgcagcatccctgatgtttcagagggagctaataagctgactgagtgatctgtttttataggtagcctccatgaggctatatagaagaacatttacatattgggttattttgcagaaatgtctcacagactgcagactgcactccctccagactcagtgctatcacttaagtgggagggatgaacgagtctacttggatagctaagaacacaatgcatggcgtaatttacgaccactctcagtccctctggttattttggttaagtttggcatcttgaatagcacccgtggagaggggttcaggctatactgtgtgcattttccacttggatagcatcaccagagagagcaaatattgtttctttttgtgaccttttgggccttcttaagggaaaaaccttcagttgttacaatgggcatcctctgtttgccctgcaggcagccagggcgtgcagatgctccatcagatcatctgcagtattaaacgctcatgaggggtgttcaggaaaggaatgtgtaaggaactctctatagggcacgcaggagtacaaaaacaacagcaagatgccccgctgtaaatggtctatgtgcttactcacgtgacattggcgacttttctctggttgcttgtctctttgtactctcttctgtctccatcttttgtcaagagttttaaaagtactggctgccaaggacggaactgtttcgattctttttctgctcaaggggagttttcttgctgtctatctttaaatatttcaaaatgtctaaaaaattatggtaaaattacacacgacatccaagtgatgagctttatgctgggagcctgcgctgacaagtatctctttgctttaagtgtttctggctggatacccacaatccaaattgccagatcacgtggtaatcttgtgtagaactcttgaagctaatttgaatgattatttttttttcccctttggtttttttcgagacagggtttcctctgtgtagcccctggctgtcctggaactcactctgtagaccaggctggcctcgaactcagaaatctgcctgcctctgcctcccgagtgctgggattaaaggcatgcaccactactgcccggccttaaatgattattattgtctaagtgtgcgcatgctacagtggaagccagatgacaacattcagaggacagctctctcccctttcactatgagttttggagatttgaactcactgaagcaagtgatttacccactgagacatttttctgggtctgtgtataacttgttaaagctttgccatatctatcagttttcaaagtgcctatgccatgatcattttcttctttaaattttttataacatatatatatatatatatatatatatatatacatatatatatgtatataacatatatgtgtatatatacacacttgtgtgtgtgtgtgtgtgtgtgtgtgtgtgtgtgtgtgtgtgtgagtctgagggcaccctgtaggctctggggttctccttctaccatgtgggttctggggctccaaatgatgtccttagacttggtggcaagcacctttgcacacagagctgtctggccagccctgcctatttcttcttaactcattttgcagtgtttgactgggtggagtgaatcagtagttaatgcgcatcgtgagtgtaagtcaacgattgataactgagttaagaatagagactctgcccagtaattctgcattcagcaccacaatgattgagacagaaaaccttcctcaaagtctacccgcactgtagaaccaagtggatggctggaaattgttccaatgaaaaccactgggctaatgtgctggattccacgtacactggatccttttaaacatttggaccgcttgtcaccagaacactaagttcaaaagaaatcctgggaggtttcccagagatttaaaggggccagagctacagggcaactcatggatgcaagtggcaagacctgtgtctacaggtgaatggagagaacccagagtgtgggaattgggtgtctctgacttcacccccacctcctttctttacaccccccccatttcctcatttacacattcataacacagagatggtccacgagtttttctctcatgaattctccataattcgagaaacagtgaaaatggctcattttctagttagaatagctgcccatggccagctctcagcaacctgtaatggctttttggtttttacttctgctaagggcaaagaaggtgggttcaatatgagatgggagacaagggttagaggaatctgaaaatccagttttctgggccaggctgctgaactgacccttgaaatcgctattgtcatgtcagatcaaacttgatcgcagaggcggggttggaccagggccttctaggcctgtcatcctgtgccaaactttgatagctcttcaacaaccaaggaaaatttttttttttttacttgtggcgttgaacagaatccagaattaagataagagagattcttacacgcaacgctaattaaatatctagggcacagtgacagattacagttggcttgtaacgcaggaggtaccatgtggtagcaacattcacggggccactttcaatatactgtttgtctaagctccaaagtttttggtagcccaaaatttgtgcatataaggtgaagttattgaagaagacacccctccactcaaataaataattagacagacaaaaaaaataattgaaaattttggaaaatatttctcctgctcaactgctggttccactgacagaatccagattaaaccaattccaaagcctggtttcacatcctctaaggtatggtcctatcaaatctactggtccagctatggattcagccttttgtaaaagttcccgtgtaggctgcgtgagctgactgtgagaggccttcttgaaattggtgggacagtgactgctctgatccattgcagagaagaggtgagatgcaggccagaggcagaacaggaagcaaaaataaaatacggtggcttccttatttctgtccgtggtacactatcagccttgatggggcctgactctgtctgttctgcgttattcagtccattatcagccctatggattgcacctctggttcacttccctgaagagcatcctctttccagttctgtgggtactagcccagttcatggctctgactgttacagtgtcccacttacctacctgcgctcagctgctacttctgttgttcccactttgctcagaaattctgaatggctccccatggcttatcacaccaacttttcaccgttttcatcgagccgaagccccgtgggaagggactccgaacctgatttcaagattgtccccttttcttaggttttcttcaagttgggccggtgagccaaagacatcagaatatttaactatcaagtattaaacacagatttgaaaaataataataatgacaaaaaacatcattggtgtgctaagcatatcatatatactacctcatttaacagatacactgaccaaaagtagttgaatatccattttaaggatgagaaaagtagtcctgagggcacaagtaatggtagtggttaataagtgactggatgggatttggaccaaagtctgctttactcgaaaaccctatgatttcaaccaaaggttgaaaaatattacaggcaagaactttagcttggataaaagcttgtagcaagaatcaatgtgccattgtctaatgtgtatcatgaggatataaatatactggaattggggattagttgccagagctgttacagtgaagcattcccagacttagctgttcaaacaaacagaaatttagtgttccacagaaggtcatttggtaaaatgcttgctacataacaatgcagacccaagtttggtctccagaatccatcttaaaaaaatgccaggcatggccgtcatgattataatcctatcacgaagaggcagggacagtggtccatggggcttgctggtcaactagcctagtccactctgtgagctctaggccaaagagagatccttttacaacacaacacaacacaacacaacacaacacaacacaaacccaggtgtatggtgcctgagatatgacacccaagacttatacactggcctccactcatactgcatacataggtacacttatacatgcacacacacatacacatcccccaaaaacaaaaacaaaaacagcaatgacaacaaaacccgaccaaccaaccaaccaaccaaccaaccaacgaaaacaaaatcccataggttcattcccacactgttctggaaacaggaagtccagagttaggctcagcaagtttgacttgtcttgaggcttgtttaacttgtcctgaggcttctttgctcaagtgctcatggaaccttctccatatgtgtgcacagggcccctgcccagggcctttggtttgtgcacatccctggtgccttttaagacaccctttacattaactgggatagggctcctttggacctcacttcatctcatctctgcaaaggcctgtctccaaatatagtcttagtttgaagtcccaccctgtagggcatcgacatagggattctgtgtcgatggggaggcagttcagactgtaacggaatcgatagctggtttggtaggcccaccctttagaagatgtagaatcaggcttagggattggtttcatctagacactgtcattgggtctggcagctgagtgggagaactgccttccaaaacttccagctagttttgtctgtctggtcatttgcttgtgaggacaggggtcgtcatcaaccacttctccaccttatatattgacggttcagtaggggtcactcacttaacctggagcacagcaattcagctagcctggctagtcagacagcccccaggagtctttgcctcctatgctgggattatagacttctatgccatgcacttacattttacagtggtgctggggacctgaattcacacaccttacacttgcatacaattcacttcaaccactgacccatctccacatcctctctagttggtattattattattattattattattattattaattatattttaaaagttgcagttatttatttctgtactgtgcatgtatgtatgtgtgagagtgtgggcgtgtgtgtgctatggtgtgtgtgtcagaagacaactttcgagggctgccctgcccttttacatgtgggtcctgagattgaattcgtgccttcagggttgaccgttaagtgcctgtttaccttctgagccgtttcctgcgtcatccagctgaatgagtacaaagggttgcatagggaccactttggagaaagaactactagaactttcttatagtgaaatggaggagagaaagcatcagacctttaagttgtttagactttcctgcaaaggtggggtgtgtacggtgaatgcatttggatatgcgggtgcatgctcgcatgtgcagaggccagagtaggactcctggtgtcttcctttggatgtctgctgttcagccttgagtcagggtttctctgtcaatccgaacttgccttttctgctaggctggctattgacagctctcagcatgcacctgtcttcacctctcaaagccagggctgcagacacatgcagctggacctgacgttgtacatgagtgctacagatttgcactcagggttttgtacttggaacaaaaagttctctcagtcaaccagaccatctccataggtcatgaagagagtcgtttggtgggtatattggtgcaaagagggaaaatgagttgggtcatctccctccctccctccctgccttccttcccccctttctctctttctttccctctttcttttgtatgcctatatgtacatgtttgtgggtgcacgcacatatatgtgaggtgtgcattgtggtgtgtgcatatggaaacttggggacaggcttgggtatcctacctcaggtgccgtccatctttgtgtgtctttctatgtgtggtctatacatgcttgtgtgcatgtgtgtacacacatgtgtgctaccacacttggtatttccttacatatgttctaggggtggcactaagttcctcctgtctataccgcctgcggcatctcccagaggttaggtctcagacctgtcagtcacacttgtggcagcatgggatatgggatttgaattcagaggtcaggccagcccgagcagccggaggcttcacttgggtgagagctgagcttgggggtgatatttaaagttcaggaagagtgaaattaaaaaaaaaatctcaggtctggtgcacactattaatcccagcacctgggaggcagaggcaggggaatctctgagttcaagactaggctggtctgcagagtgagactgcctctgataaaactgaacaaacaacaaaaatccaacccaaagcagaagtctcaggtgtcaaagtgttctgtgtggaaagtggtaggaagacttccccgtccatctgaaatggaacttctggctttctttacctgatgcctggcacatcagaccactcgcccttcattatgcagcagttcgattgttgtctgtccctgctgtgaatgtcagctccacaagagactgcatttctgtccagtgctgttcagcacaccacccggaagggtgtccagattgctatacctgctccttaagcagttactgaatgaatcagtgaatacgtgcgattctgtgactaatggaatctagattggtttaagttggttatagtccagatattgcctttttgtttcctgcagaaggtttttttttttttttcctttaacaaatcctgtttgataaatgaacactgacacaaatcaaaaagactcagcatgaagtattggccttgtttctgcttgcattttcccaatttgtgccttctcctgactaagatcagtggtgccctcctcagctactgtgcctaagaaactagatgtgtctctgtcttaaaatccaggcttttctggttacccctagattatctctttgcatctatctttttgttgttatttgtcgagttttgggtttctgctagctctctttcccctttactggatgaacttaggctcttatctcattgtagctgtgaatatcagagctccatttacaaataacaagtatgcctgtcacccttgtctacacgtttctacagtaatgttgctgctatggaatagggccatggagttgtcatgaaatacaaccataggttggttaggcatttaaaccaattccattctctcccaaggaaccacacaaggtacatctgagactatttttgaattctcttattattacacgcctcctctttcagcagcctgaatcatgtaagtgacattggaattattgggtgaaggaatttaaatgagggtgctctaacagatagggaattcctttgttgggggtgggggcgctattgaaatcaccggggaattgtaccaggtgccccacaccagtgtgaagatcgtatgtggcacagaacaccagttggtaagagttatacccatctggaaacttggggaaatggctgagagtcactgagaatctcaaggattctgatgagacattggacttataaaactaaagccaaaaacaaaacccaacaaaaccaaaccaaaactaaacaccttgtttccatccttagttctttctgcagaatctttttttttttcatcactctccctgccacttcagactctttgttgggtttctctggaactctatcctgtattggttgatgtaggtggatgggagaggttgccctgcaggtaatgggacaggcctgtaagatctagaatgagtttcaggagctgggatttgacctgatgtttggaaacagggaagatggaagaatgttgagaggagccctgatttgctgactcattgctgattggcgcatcttcaggaattgctcattctaagttttctaacgtattaattcaacagtacaatattttaaatgatatctggctcctttttaaaaaatattttttattaggtattttccttatttacatttacaatgctatcccaaaagtcccccataccctcccccccactcccctacccacccactcccactttttggccctggcgttcccctgtactggggcatataaagtttgcaagtccaatgggcctctctttccagtgatggccgactaggccatcttttgatgcatatgctgctagagtcaagagctccggggtactggttagttcataatgttgttccacctatagggttgcagatccctttagctccttgggtactttctctagctcctccattgggagccctgagattcatccaatagctgactgtgagcatccacttctgtgtttgctaggccctggcatagtctcacaagagacaactatatctgggtcctttcagcaaaatcttgctagtgtatgcaatggtgtcagcgtttagaagctgattatgggatggatcctggatatggcagtctctagatggtccatccttttgtcacagctccaaactttgtctctgtaactccttccatgggtgttttgttcccaattctaagaagaggcaaagtgtgcacactttggtcttcgttcttcttgagtttcatgcgtttagcaaattgtatcttatatcttgggtatcctaagtttctgggctaatatctacttattagtgagtacatattgtgtgagttcctttgtgattgggttacctcactcaggaagatgccctccaggtccatccatttgcctaggaatttcataaattcattctttttaatagctgagtagtactccattgtgtaaatgtaccacattttctgtatccattcctctgttgaggggcatctgggttctttccagcttctggctattataaatgaggctgctatgaacatagtggagcatgcatccttcttaccaattggaacatcttctggatatatgcccaggagaggtattgcgggatcctccggtagtactatgtccaattttctgaggaaccggatatctggctcctttttcaccagtttaatgacacaaatgtgaaagtgtgtgcatgtgtgtgtgtgtgtgtgtgtgtgtgtgtatgtgtgtgctatacagaaacaagctatgactgagctacattctgagaccccagctaacttttatgttttgattcattaaatccattggtctggcttgaactttaatagttcttttacccatagttgatttttcttaatgtcttgcattgttcatctggaacatatagttaattgagtgatgtaggttctctaatgctttatcacgggtataacgatatacacacatgtatgtttcattaatttaaaaattatatttgtggataacctcatactggcctcatcacagaagtctttatgtaccaatcagggggctatccagctcaggtgacctgacagaaattgcctcaaagtttactttttcattaaaaaccttaaattctttcattgtcaacaaatactgatagctattcttcttgagagagcagatttactttgtaattaaaaagaaatcagaatatctaggttgcctttcacatgaaattggtattttctgacagtggctcagcttacagcccagtgtttgattagaacaaatagcaacccctactccaccctggtgagcaaagtacgattttgtttttcaaagcactcttttttttttcttttaaagctttattcatctattttatgtatatgagtacaccatcgctctcttcagacacaccagaagagggcatcaaaccccgttgcagatggttgtaagctgggaattgaactcagagatctctggaagagcagtcagtgttcttaaccactgagccatctctgcagcccaaagcactctccttaaagacaattatcgtacctcaaggtactgcacaaacatctatgtatgtctcttcacacagaaaattaatgtgatattaatgtaatatttcagggatcagtatgaataaaatttagaatcatgattctgtctaagacgtccttgagtgaaacatacgattttgttcccctagccttaagttaagattcaaaacggtgagtgtacatttcagatgtctcaacgccagctgcatctgtagttacacactcctgtaatctgctggactgatatcaggcgagggagaccaagtagcaggagcagtctgtagaactgtcctctcaggtggaagcagaattcttcacaagagctgcttgctgaggtgcccggtcatttgaaagtggcagtgcagtcatcccccccccccccatttccctccccttcctgtcagcaaatcaatgagcagccattcctgccttcttgcctgcttacttctgccaatacagtatagtagctcaccctcttagatactggtgtctccatttcaaataggaaatgctgttctaaactatttacggtattaagaaagttcattacatttacacttaaagaattctgttccatttttagagctctgacaatggtgttacaacattacctgtaccataaaacagttcaaactgttcagccgtatgaaacacaataaagtaaattattaacacctgtactgccagggtgtcttcaggtcactttggaagagatttctcctttccacgagtcacagagttctaggatacattattttcatcttttccattgtccttagatgcagacggtgtgcatctgagcctaaaaggccacaagtcgtctcatctttatctttagaacagcgtcagacccacgttagacaaatgagggttttaatcactgtgacagttcacgtgtgtgtggtgtgtgtgtgtagtttgcgaatgtgtgtagagaggagacaaagatctgaaaggagggtagagagaagacgatggaagcagagggttaaaacgtgtgttctagaaggttatctaactggtggggacagggagcagctagtgggggaaggagatgagttggggaaggaacagatcataatgacaaatacatataaaaatgccacagtggcacgcattggttttggtatgctaacttaaaagttaatcacacagaaaaggaggcaactttattcaagagcccttaattgggccattgaaacagtggggggtgggaagaactgcaggatgtctgctagcggccctcgtgggccaggcagtctgcttctagtataagccagaaaagaagtgtttgtactagtcacctatgaccttcaggcgaaggaagggctgtatttacaccaatcacaacagtgttccatctgcagcagttgcagcagtctctcctagactaccaccaggggacaggccttcaatctggccggagtgggaagggttcctgggtgggggtgggggtgggggagaagtgtggctctgaggctgcatcttcagaagctggagtagtgttttagaagctacagccgccatgtagctctctggagtgttgaatgtggtttgacagttcttttctctcaaggctgcctgcgcacagaacaagagcctaacagctaacaattaggggaatcaaatcccctcacctccccatatttgtttatttccagaaaacaagcagctgtgcgaacggcaaggcgtcattgatattaattttagctgtgcttttagtcatgctccacacctgcctagccctgtagcacctgtgggctgcctgctgcttacccccgtcagcaatgctagatttgtggattctgcctagcagagccatttacttacgtaatgatctagttatttctacttacctctttgccactatctcttcttctaggtcactttttttttccttcttcttaggccactaggactcccctcagtctcatcttctctaaaactgtttcatttctgccagcttcagattccctcacgttaaagttctagtaacttcgctggtccctgtaggtgctccgctcaggttacctttcacatttatgctattttccctttggcagtcctaaaaggcactgcggattcttccctgactcctggccttaattcttggcagatgattttcctgcaaacgctttagggccatcctttagggctcatctcattctttgcgaagacttcccccttctccccctctccacaagaaagtctctttttaggctgttcactgaactttgtacctctcacgatgtttaatcatagtcagtttcttttcatcggtgtgtgtataccttatccccacgtgttaagatgttacttgaaaatttagacttaatcattcattctttctctcccttaaaaataaacttcccttgacggttcgctagttggatttgcggcggaagtataaacattgaaaaaagtattcaaggtagaggcatcaaaatccctgtgtttatcaggactaggtcaagttgtgcagaataaaacgttacataatacgtaaaaaataatataaaacatacaaagaatatacacgcatatatgcgtattcatcattttgctagaagcttttttctagtattgaaggatacgaaagggtagtcattgctgtttattctaatactgtactaaaaaaaaaaaaaagattgcttatggcccagatatgaagttagagaaactgcaagagctctgaaattgagtccaggccagaaagtccgcgggcaaccgcttccaggtttggaggcgggctaaatgttggaggcaagggaggagactgaactctgcacgcaccgctctggcttcccactccccgaactgggcggacctgttcttgcagcagcccggggctcccgctcgcccccgggcatcgcagcccctgcgcagacagcggttgccgcggaccccgggcccctggggatgcggtgcgtccagcgaaggccaaccggggaaacttggagctggccccgacgggggttcggggcgcgggtgctagccggggtttccaggtgagccgccggaaaacaaccggtcggcccgggcggggcggggcgagggcggagggcacattgcctcatcccgggcattttactggaaactagacacatccggaggcggggcgggaggcagcccaggcgccgcctcaccgggcggagcgcggaggaggaggtcagttcatttaaatagcccggtcccctccgggcgcgcacgtactagtcgctctgccgcagccaaccgcgtagccatccggtggcgcaggtgtctggggaccccgagcgcctagcctgggagcatgatcgtggacaagctgctggacgacagccgcggcggagaggggctgctggacgcggccggcgactgcggcctcatgaccagcccgctcaacctggcttacttctacggcgcctcgcctccttccgcccccggcgccggcgacaccggctacctgtccgccgtgccctccgcgcccggctcgcccggctccgactcctccgatttctcctccacttcctccgtgtcctcctgcggggccgtggagtcccgtcccagaggtggcgcccgcgccgagcgccctcaaggtacccacccgcgagattccttgcccctctattcggggttcacacgnnnnnnnnnnnnnnnnnnnnnnnnnnnnnnnnnnnnnnnnnnnnnnnnnnnnnnnnnnnnnnnnnnnnnnnnnnnnnnnnnnnnnnnnnnnnnnnnnnnnnnnnnnnnnnnnnnnnnnnnnnnnnnnnnnnnnnnnnnnnnnnnnnnnctagcgcgctggcttcctggaaaagaacttgagtagcctcgggattctcttttcttccatctcataaccttttcccttttcacttctcccccgacctccgaattcaagaacctctgagaaattataacactattatgaggtttttggagctgatggagagagatgtagtttccttcttgtaactctttcagtgagaagcagtggcagagggtaaagcgttgggaactggatttttaagacacccgtattcctaatctatttgtagggatgaatcaaagaaaacccacttttcgggacgtagaggaaagcctggttcagaaaagtgatttagtgttctgcgcttagtttacgatgttggcggttcagaggcctgctcagaattctgattttctctgtgtgcttgagaatggaaaagttacatctagcgaagccctttctttagctgcgggttgtatggtttcctttcttcacgaaccgagttgcataatttgggggggtgggggagggagaaacaggatgcagctgtgggtagatttaaacaccgcctaaattttctcagttgttggagcttctcatcgcaattattttaaagaatgaccccttgctgttccttaacactggctactcataagctttggttgtcttttatttttaaaaagttattttttgatttaaaacactgtgccttaagccacagtgttgcccacagctccctgaaaagcgcggtgtgcgtgctttgacagccctttctgaagtttgtaggcccgtggacatctggctgaacccatcgattgtttctagttcttggtttaccacacaagccatgggagattcctgaaagtgcgttttcttctccctatgacgtgggcatggaagttttaactcttgtcactccagaggagtgctgttagagtctggccattggggtgtttgtgggaattcctgaacttgaatagaaaggctatttaatcattttatttgccctcgtcactgtctctatgtcacacttgtggcacagatagccaaattatgctttgttctccgttcgttttcctctttatgttccaaatatgttcaattcatggacaagaacttgttacatagttgtggcactcagtaaattctaaaactgccttctgaagttctaaggtgaacaggcctgtttccgttttacttagaacgcccatgtacgtaagtgagggggaaatcctgtgtgtgtgtgtgtgtggaaatgtgctaagtgaatttaagcagctttcttggtacaaattaatgaagggaatactaagaaatcttaagtccctattgctgacttaaagtttgccttggtgccttgagaactttagaggaagttaggtgaatggcatacaggtactttataatttctatatgaacataaaagaccttgttttaaaaactacaaatgcctcattctgctccaaggacttctcaaagtcaagaatagttatgtataagtctccgatcttggctaaagctctgttcctatttcatgagtaaatagtagtgagagacagagaggctttctttgttgggcccaaggatcctctgccacatttgagagtgctttaattccttagggtgcctggttggaggatcagccaacacagacccccttgagaagtactcgatatagataataggaatccattgacccaggatgttggaaaggctttgagcatgggaaaactttgcaatttgctgcttgagggctttatccaccaggctgcagtcttggaaggggtgcgggaacagtcgggattcatgtctgtgaagagatgtaattgagacttgtccttctgaacagttgagccccacatgggggttggcaggcagcagagaggcccctttcaaggtgttcgcgtgaagaactcggtgaaggagctcctgctacacatccgaagcaacaagcagaaggcttccggccagcccgtggatgagtttaaggtggcggcttctgctctttgttttgagtgggtgggagactagtccgtgaaggttattgtggtttgctaaccgaggtccagttaagtcccttgtagtctttcataggtgaccgagttcctaggacaggagatagatagctgtctgagtacgctggactccctgcccttggctcagtgccaggtgcgtctgagaaatttaatgagccaacaaaagaaagcagtttgaggacaatgggattccgtgggttcagtacacagagaacattttgattagagaggaatgaatcagatggtcttacttatttcatcctgaccaggattgaataggctaaagtgaaaacagagaagggggaggctgggaggagagagagagaaagagagagagagagagaaagaaaaaatatgagaatgagaatggaggtagcgttctgtcaggatttatatccccagaggcttatggggttctgtagagggtaggagagacagatctccaccgagtgagaaaccatgttgtatgtactaagctggaccctttcccattgcagacacagagtgtgaacattgagcagctgacaggtaagagctccatctatttttttttttttttccataatcttacccgggtcctctttgagtgaaacgattccgtgggggatataaatggaatttgtcaggttgggatgatgacagatcgcgccttctttctttgggaacagacctgaagagtgcagtgtccgcagtggggaaaagaaagggacccgatcctctgtccgatggaccggtttgcaagaggccagctctgttgccttctcacttcgtggtaagcgtctccctgttttcctctgaacactccgtggaactcattctgggatattgttgctattgaaaaaacaaaacgaaacaaaaacatttttgcttcttgggatagaagccaagtcatgaacctagcactgagcctaccccctagcttttggagttcttttaaaagaaatgcttatgagagcttcttgtcccccccctcccccccttctagacatcaccgcaaacgcctacacctggggagagcatggaagatgttcgccacagcgaatccaagctggatagcagcgctgccctgcttcagaatattataaacatcaagaatgagtgcaacccagtttcactaaacactgttcaggttagctggatgagccccacggttccccagaactcgccaagagaccagtgccaggatttccatggaggccaggccttctctccacctcagaaataccaaccgttccaagtcagtggctctccacagatgatggaccaggcgtcaatgtaccagtattcgccacaaacacagaacatgcagcagccgccgccgctgccaccacagcagcaacatcaacagaattatccccacaactcacccctgcagttcagtccttactccagaatgtcccagtctcccaagtatgattccaacctctttgatactcacgagccacagttctgcacgggccaaagttttgtgtctttactgactggcccgggggaacccgagtctcttgctgttcccgttccggctcccaccagcattccaccccaaactgagactcagctgcagaccttcagcctgatgccaagcaatgcctgcgaggccgtcgtcggggtgcacgatgtgggctcgcactctttgggcacgtccctgtcactccagaacatcatgggaagcccgatgaataccacccagctggggaagtcattttttcagtggcaggtagagcaggaagaaagcaaattggcaaatattccccaggaccagttcctcgctagggacggagatggtgacacgtgagtatctttttagttcatgtcctttcacgcttgaaccttattagttggcatgatgatgataattcatatttcaaggaaggctgttctttttatctttttttacccctcaaaagaaattactttttgttttaaattaaaaatatgtactttccgtgaataacctgctgtgaagactaatgtagattatatctttagaggagaaacagttagatcatgactaggcattgataaggagtgaaccagtaggctagatcctatccagtactaattaatgtctgtagagctttgggtaagttacttaaactctccctgcttctagttcttggcacataaacaataatgttttcaggcatagaatttttatcagtattgaaaaaaaacaatagggctgggcagtggtggcacaagcctttaatcccagcacttgggaggcagaggtgggcggatttctgagtttgaggacagcctggtctacagagtaatgagttccaggccagcctgggctacacagagaaaccctgtcttgaaaaaaaaccaaaacaaaagcaaaaaaaaaaaaaaaaaaaaaaaaaaagttttttaaatgctcagcctggtgttcagcattcttatccttttccgtttcagttcaggtagactaccaccatgtcagaagtgccaaatttctcctcctctgtgatgtttcattttgagtgtatcaatgtatcgttaaatagggtgaaggaaatttttctctgatcaacctaatgaagtcagaaacaattcctctttctttcgcctcttcaccaggtttctccatattgctgttgcccaagggaggcgagcgctctcgtatgtccttgcaagaaagatgaacgctcttcacatgctggacattaaggagcacaatggacaggtgagggtgctgcctcggctaagatggagtgctggagtgaggggtagccggtctccagtgcagactgtttaagagcctcaaatcaagagacttctgttaatattaacttggagatattgactttttgccaccattaaccttgaagtcattaatgcttactttgtagttgtttggccaaagattgcgtataattaagccgcaccctaagcttattttagtttcctcatcttgctgtgtttggttgcttattaacagggtttattttctttctgtggacattcctctcagccacagtttagtttcatattccttgttatgatagtgttacaggcttaaaaaaaaccatcttctctccatatgtccacagagtgcctttcaggtggcggtagctgccaatcagcacctcattgtgcaagatctggtaaaccttggtgcccaggtgaacaccacggattgctggggaaggacacctctgcatgtctgtgcggagaagggccactcccaggtgctccaggtaagaaaagaggccagaaagcaggcttctgttatcaaaagatgtgcttggatatgagccgtttcccgtaggctgcttgttaaaacaataatgctttgagttgatttatcccttagcccactagtagatgcctatttgtctgccccacctttggataacaggcgtgtattttataaaccttgcaggccatccagaagggagctgtgaggagcaatcagtttgtggatcttgaggcaacgaactatgatggtaagaggctgatactttattggctaaagcactgcatggaaagtggggtgcatgaaatctaagagcattcagtgtcctaagacagaaagaaaataaagcaagttgttctacaggtaaaaccgcctcggtatatgcggattatcttactaggttttatggagcccgttctgagtgaatcgaggaagcatcctaaggatagttacagggaccaaaagacttggtgggatgcctgacttcctttgtacccttttttcctaggcctgactcccctacattgcgcggtcgtggctcacaatgcggtggtgcacgaactgcagaggaatcggcagtctcattcgcccgaagtgcaggacctcttactaaggaataagagcctggtagacaccattaagtgtctgattcagatgggagccgcagtggaggcaaaggtaacttcacagggaaggtagagctggggtgggggagggggcgtggcagagaaaagtgggcgtggcggaggcctggcttgcaagcgcagattaactcctcccccctcctcacccccctacccacccaccccgatttttaagttggtggagtgaggggctttatatgtgtagttcagaagctaacctttgaaaagatcttttcatccgctttcttgatttctttttaatctgtggagttatccaaacaaatggatcatttaactgtgaaacgagttaatctttgttttaaatgaagctggaaatcgatggtacattggtttccgttttcatgacggtgcttttttggaatgatttcttagtgcgatctggaatttttaaattttgattttttttaaaaaatatttttataatgagatttttacgtgttttctgtgcgcctgtgtattggtccatgcggaagtcagagaatcacccataggagttggttctttccttccactctgagtcctggcacttagctcagctgtttagaattggtagcatgcaccttaccccctgagccatttctctggccctctgttaaactggaaaatattctttctaaatctggggattatttatggagtatctgctgtgtcctgaagcaccgtgttaaatactttggggattccgatgcccacgtgggtccccatagagcctgctgtcctctcccactttagcaatacatggtggctgccaagtctggcgacataacacatcatcagtggactttgatataaataagaaagtaacactttatatttctacattgttaagggctgctctgtgtatgagtggaatgtgacaagaatcaagtaggaaaattagttgggaatacaagaggaataggagagtccatgtaccctgggctttggggagactgaagaaggaagcgtccgaagtgatctctaaagctgctttagacatttgagagaggagggccaaagcatattgtctaaagcagctgttctcaacctgtaggtcacaacccctttgggggtgagggggtgtcaaaccaccctttctcaggggttccgtattagatatcctgcataacagatatttgcgttatgattcataacattagcaaaatttcagttatgaagtagctaggaaaataacttttggttgagggtcagcataccgtgaggaaccgtattaaagggtcgcagctttgggaaggctgaggaccgctgctctggggcgtggcatctggattttcagtcttcgcctttcttgccttcccaaggatcgtaagagtggccgcacagccctgcacttggcagcggaagaagcaaatctggaactcattcgcctctttttggagttgcccagttgcctgtctttcgtgaatgccaaggtaattttcagaacctcagtgctgccagcgtgggaatgaccttcccacctccacgcctttgagctcctttcctggaatggccctctgcctgacgcatgcgcgcttctgtcctcttgctttcaggcttacaatggaaacaccgccctccatgttgctgccagcctgcagtatcgggtgacacagttggacgcagtccgcctgttgatgaggaagggagctgaccccagtactcggaacttggagaatgaacagcccgtgcatttggtccccgatggcccagtgggagaacaggtgagggccacaggagggagtggaagttcctttaggcccttgcgactgaaatataaagagggaggaagtcgttcagggcaaaggccagctgatgctctgcaggtaggctcgtcagtgtagaatatttgacgtagttcaggcacaagtaaataaatgcctagtgaatatcagtttttataagtctgtctactaactgatcctccataagagatggaaaagaacctacaatatttttaaattatcctgttcttattaagtgtggttatatttcatctttgggggttgaatagttagttacacatgagtaagctcttctctgtaagaacttaatcttttaagaaattatttttggcaaacatcttttttccagagggaatcattgtgttcggcagcattggatagacaattttatacgctattaatcataagttaatttacacaggttagctttttgattccaagctgtcatcagaatcaaaatggcctagtaacttgcccacggaactcttaggaagtttgtggcagttttcatttaaaagttgcaaaacctttttaggcaggtttaacttggagaattaaacctgtatttagagaggacaggaagcgtgaataactaggaaatggcggtctcaagctcagtagtggctgcttcctcgtggtcacacacccagctgtcacacacccagccctgaggctggagtctgaggctcgtccccatccctaaaggtttttacagtgctgccattcttccttctgtattgtgtgtgctgtcacagagaggggcttctcttttccttcctcggtaggcggtggccattggacaggtttcctttcagaaagcagctcgcagcaacagccaccaaaatctcttcctctaattgcttctaatctctcgtgggctgaaaggcagatacacaatttgtctgattgggatacaaaaagtcagtggctctagatgactgtgggggctttcctgagacccggagagctacacacagttgcttggacatttggatatcctggccgctgctctaccacgagtttgacttggctgtgctcctaagttaggggtgcactgtagagggttaatgagaggagtgaaaatctgggagacatataccgcttggagcattggaagtaagttccacgattcctttctcttccagatccgacgtatcctgaaggggaagtccattcagcagcgagcaccaccatactaggtccactggcgtggagcctggttcagcgacactcactgtcagttaggcagtcctgatgtatctgtacatagaccatttgccctgtattggcaaatgtaagttgtttctatgaaacaaacccatttagttcactattatatagtggattatattaaaagaaaagaagacagatatctaattttcttggcagatttgcgtatttcatacccaggtatctgggatctatatatctgaatttgatcttgaatggtaaaattaccttcgataaccagtagctttcaggtagggaaaaaaaaaaagactcatgggaaaagacttgatctgtggcataaagccttgctcatgtagagattgccaggtccagattaggtgggcttgaaacatgaggtgaaaaatgaaagcatttgaaaggggacagaaatttggatgtgaggttgatgtgcactttgctgtcatcgatgcttctttggtcagatgcaggacctggtgtttaataatgctctctctctaggtgagggaggcctcttgataggatgtgatctttgaagctgtatataattctcatttttaccttttaaaatgttgtacatatttgatttgaaccacggacatttgaaatgtgtaagtcaatcaagtagaaaagagctagtgaattgttcaccactttcaaggttgtgcacccacaaagcaacttgtactgtgtaatcgtccagctagagtttttacagataaagcaaatggggaagtgggtcccaacgttgctgtggtagcaggcgggtttctcttgcattggaaacagacacgtttgtaggcatttgcgtattcttgaagagactgttttatgaatcacctcttagatttatgtaatttacctaagttgttgaagtttctgtttctccttaagagaaattacaaaaattcaacattgaagcatagtttcttgttttctgttgtcaaatagtaataatgtgctgtgatgtttatgcttattcataaagatgttttactttttagtgtaatgttagttcttttaacattattttgcttaaatttgataatgcccgacaagaatatattttgctttgatttatacactgattctttgtgacaaatatgacccattaaaaatgccttttaatagactaacttaccttttgtagctaggtactcatgttcttttttaaaagatgccctttggattggattggattgatcatgtttaactcagcgtattttatggatgaaagctaaatacagatatttggcatctctaaggtggaatgagcccactccacacactgataaaattcatgcatagttttaaatgaacattaataaactcatgttgtcttatgtgtttttcttttctagtgccttatttgtgtgtagtttgaagaatactatttttttttccattactaaaaatggactctaggggccttgtgtgtgccaggcaaactctttagctgctgtgctctagtcctttctagcctagaaaaggtattaacaacaaactcagagtcttaacaaacaaaacctttaagttacttacttttggcttttgtgtgtgtgtgtgtgtgtgtttgtttttgagaacatttcctgaaattatatgccctttttaacatccaaaaatggcttgctatattcatgagaagtttacgttccgaaaacacaaagtttagtagtagatgctgttaaactcagaagtttatataataaaaaagacggacaggtcagtggacacagcaaacagtgtagacattatccgagtcatcctgagagggagggatgccagtctctgaacagtgccaagtagtgtttttcccttttcccattattataattgctgcacccgcatcctggttcttgagagtacccgacgacagccatgaattcttggaaagtgtgcctgagtgtgtgctgtatgtacaggaatgacgatccacattgccaccatcttcttgagttcagctatggacaattgtgctaaaagattgtcacagctgagctattgactattaaccttccctcagaaggaggcagcaggaatgtcaatggactctcacctgaatatccaaccattcctcctaattagttgtatttctgctctaatttcaaggtcttaggaaggggctagtctattaggctgcggaagactctggggaagagggttctacctgtgagacatggacaatccatactgggcatacattttttttggtgtaactaatttgggttcatcaatgctcctttcggtaaccccctactcggtctatataaacctgattggtatacttgttggctctccaggggaacttatatggtggttgtcccttcccagagtgaaagtttttagtcagcatatgtgcaatgatgcatacagtatcaggcttagcagccctagaagaacaaggctcataggccaaggctctgtttcacagtttttcttttagataatgtcttgcgcatagattgtaaatgtacctgcttagatagccatcagagtaggaacagaacacactactgaacatgcctacacactgggttctctttaatgagcttatgagtgtcccttaattagtgttcccagcaatcggttctttcacaatctagtgtttaacaaagtgtgtgttgcacatgcataggggataatataaggcaaagatgtaagaggtgtggtatgcagctgggcgtgatagtgcacatctttaatctcagcacccaggaagcaaaggtagttgggtctctgtgtttgaggccagcctggtcgaccctgtcttgaaaagacacagccaaccgatcagaagagaggcatgccatgtactttattgggtagactggttgaagtgccgttgtgagagattccgaaaaggactgtacatctgggaggattcaaggataggggatttgggctagacatggaatagttgatccagatgctcagaaagggaggaggaaagtggaagaaatagaaaacagtgagaccccgggtggtgatctctgtgctgtttggttagaatctaagatagccaggtgcttctacttgtgttctacatgtgactggtaatattctatcacactgagaaagatcctcaaccttcctaggcgcttagcggggaggaagtacagtggtggactctgctgcaatggtatggaaggcagccccacagaggccaagaccgcatcccatactcgttgcttagcgtgtggccaaataggagattcatgaaacactagttaaatgagtgaacaagttcatgctagttgtggttagaaccactggttactgggggaggaagtactgtgaacaagggttcactattaatgaattaaagtctaatatatttagctatgtaattttacatcagtcataggtaaggataaggggccttgttgggctcttaaaaattatcctgtatatcagtatgtccctctttgcaaacaataatagtttggatatagactacagagtccccacaagtcacacaccaatgtttccagctttgttagccaaattagtagcatttaatgtcaggagcggaaaaatttctaaaactcttctagcttttagaaaatattgacttctttttaaattatttactcatttttattttatgtgcattgatattttgtttgcatgtgtgtctgagcattgatgttttacctgcatgtgtgtctgtgagagggtgtaagattccctgaaactggagttaacgacagtcgtaagctgccatgtgggtgctgggaattgaacccaggtcttctggaagagcagttagtgctcttaaccatctcttcagtcccctttccccccaatatcaacttataaataacatcaatggttttcattttttgataggatcaattactctattcttgaatagagtataattattagcagctactttatattgaaagtggcctcagggataaatcaacttcaaagttctgaggtcagtgtataaagtttgagctttatgtatcaaaagatggcctagtcagccatcactggaaagagaggcccattggacacacaaactttatatgcccagtacaggggaacgccagggccaaaaagtgggagtgggtgggtaggggagtggagggggggagggtatgggggacttttgggatagcattggaaatgtaattgaggaaaatacgtaataaaaaaaatatttaaaaaaaaaggaaaaaaaagattgagcttatttagaccagtatcagacacacagttgatagatattctcatggtttttaattgacccttgtgtggcttttcaatgcatcccccctccctgcttgacacagtgtataccttaaagtgtattttatctttgacatagagctcatgctttgatccagatctatttcacgtcattcaccatgcacaaatccagtttcagggttcttcttaaaggtcacactgtacaagggaagtatttccaggaaggttgtagattcctctcatatatatgtatatatacatatatatatatacatatatatatatatatatatatgtatatatatatatgccagtagagttggagcatgataatagcccagtggttgtaaaaaaagaggtttaatttttaactttacaagaaataagttgtcattagttattttgttttctgttttacttatgaataaatgtgctgttttccatgttggatcacagtatctaaagttgctcatgggggaagcaatatggtcataagattaaacactagttttctactcggagcacttgactttgtaaagataacagcaaggtgggtgctcgaaggaggttgcagatgttggaatgtgaagcgttaggcagctggtcctgagtccacatggctcacactccagttgatacacgccgctctcattgagtgacagccttctggctattgttctgcaaatcatgtcttcatcagctttgggagcggtttagatggatcgagcatgtgtttcctgttagaacagcagattagccataagtgggtttgacaggagagacgcatgccaattgggaaataatactagattccttagcttaacagattcaaggctcaagtttgacagctttgtttttaatcagctcattatctctcagtcctcttggcctgccttccttttgctgccaatgcctctcctatagagcttgagttccaagagcttgcatcagtgtggaacctcagggatggtctccaccagtgcccatggctttttctcttctggcactcattcattgctgaggaccatgttcatggagaacagactttcacaactgggttattattttttttaataaaatctttctatctggaattttttttaaagataaacatctgaacttgacttagcaacaacttcaaataaaatgcaatatactatatatatcttggtttaaagggaaacagacctctttagggacccacaaactgatttttttttttttgatatagatccaataaagctgtttattaagacagattgcctttcagtctctttaaattttatgggtaactgttgggttttttttttttcatgtgatatagtaaagatctatacagagaaatttaagtatgcatactatttcttttcctatatattctagccccacagagaataaaatgtagcatgttaaatacaaggggtttaaacaattgacaagtttatctttatggcattttccatttcccaagaggtatcaataggtagttttatttttcttttaaccaaagttctatagactctactacaaaaggcacattatctgttgaattaatttttgtttctattttttgcttgtcattactgcatgccaaggcttttgcatgttttctagattgccacaataatttttttgtttatcttttttgtatgtgagatgagtatgagtaaatgtggagtgtgtgtgtttgtagtgtatacatggttgacactttccttgattgcttttcaatttatccatacaaacaagagtttcctctggctgtagcagaaagaggatgccagagtgattttaagtctgagaaggactcaaccctcaattagtggcttggaggataaaggaaacggcatgtgccatggaacacagtagttcctttaaatgcagagagcaactaggctctcaagtcttctacacacaagggaccaaactctttcaataactgaataatctcaaaagccaatcctcctccacggcccaggtaacactgtttcacattagcattccaggcagataatgtagccaagcccatccagaattctggcctgctcaacttcaagttaaacacaatcggctttttaagctgctaagtttggaagaatggcactcaaaagaaaaacagacaccacaaacaggtaatacagtgttcgagcttgtagtgcgagtttgtgcactcctgttatcctaagactctgaatcagcaagagagatttcccaataagtgggctcgtcgtacaggctagcaggctttgtttatgattcctactgttatccatcagtttcccatggcaggcagaaatcaaaagaaagggaggtctcggtattgccattgtttctaacaccaagtgtgtaagcacttctttgagcagaggaaggtaataggacagcatatgtgacaaccagtactgtcagcccactggtcctactctgaccattcactagtgttatcaggaaggggcaggtagagagtggacactgaccttgccggcagctgtgatgtcagatggtgtgacctgcttatgaaataaatacagatacacacctcagaaactggtctttcaaaaagatggttactcagagttcttagaaagttgagaactgcagttccagccttcttgccacctaaaatcagaaccgatgcacatctctccaggtatgaatatgcaaggcaaatggctagacattcatgtgaaatacctgggtgtaattcataaagaacgtatttcttatagaatttacttctgaaggattcatcatagactcaccatgaagataatgcttccagtttaaagggatgaatgtcctttaaaaatcaacttttttttttaaataaaaaatttggaggggaattcaaacataaggactgtagttacataatttaatttcttgctctatcctttgatagtcattcattccatgtctccctctcaaattcatgaccttgtcatctgtaattgctattcagaaaagtgtacagttcaataatgtgtgcacccatgtaatcaacactcaagtcaagatggaaaacattcccatctccccagaaagtcaccccaccccgcctttgccatcagcccctccacacactgatcaaggtgactattgatctgttactacaatgtagctttgcctctactagcccttaatggaaatgacagcgcatgatatatttactctttctgttcagcatctctcactcaccctcgtgttgttgagtgtcatcagcattgatgcatttattgaggtatatttctattgttgactagttgtgtaaatagcatctgttattcatcttttggtggctgtcttagggttttattgctgcaaggagatgccatgaccacagtgactcttataaaggacaacatttaattggggctggcttacaggtcagaactttagtctgttatcatcatggcaggaagcatggtggcacgcaggaagacatggtactggagaggtagctgagagttctatatttggattcacaggcagcaggaagagagaatgagccacaaggccacccccagtgacatactttctccagcaaggccacaaccactccagcaaggccacatcacctaatagtaccactctctatgggtttatggtccataaaccaccataatggcctttggggtttctttcaattttcagttttggctttcatgaataaagttgctacagatagcctttgtgtgggtgtatgttctcatttcattttggtcaacacccaggtgtggagtttatatttgtgattgtttaattttatcagaaactgctgagctgttttcttttgcaaacctctttatcacttgtcacttccttgtaccatctgagagatttaactttgtccatcctcttgaagagttagcactgctaggcctgtcagtcttagctcatccaaagggatttctagtattactgtattattttatttttcatttttccctaatggctaaggtaattgattattatttgtttattgaccaattgtatatatatgttaaaaaaaagacagttttttttttggtgtttttgtttttgtttttacctcaggctggcttcaaacttattatgtagccaaggatgacatggaacctctgatcatcctttatggcctgagtatggggactattggcccgcagtactatgcctactttgtgtgttgatggggcttgaatccaaggcttcatgtatgctaggcatcagctagatgcaggtgacacttgcctctaatcttagcattcaaaatctgttgggggacaatcacaagttagaggttagcctaggctgcctagatactgagtttgaggccagcctgatttatatagtgagactttgtcttaaaactctataatgatcactgttgctacttagttttaagcgtttaaaatatacttatattctggatatttccattgacaatttatttcaaaaatatctttcagtctgtggcttgcctctccatcatttcttaggaaggtactttgacccattctttctttctcttctggaactttaaataattatagaatttcgaattgtcctagtatgtctgtggtccctactgccatctttggtttaccatgacttatttgttattattgtcattgaacttttcagcctcagacatttcacagttttaaaaatagagtttaaatttctctgctgggatttcctcttttcactcatggggtttatacttcccttagttctcccagcacatgcccttccttcagtaatgtttataatagctaaattcagaagctcaggaataactatccttgcgttccccttttcctggggagcacacctgcttgatttttgttgtttcaggcccagttgtttaactgtgtagacgttaatagtttatgtattgtgtagactctagaatttagtaatctaagcattacctttctctcctctgtagcgcagttactggctgtcttcctggaagttctatatgcttgttctcttgcttcctgaagttttctttggaaagctcaatgctttacaagtcccatctgtttcgcagcaattctatccccaaatttcattttctttgttgacatctagagtggaccttactctagattaggtttcacttcttttctggtatctcagtttggggcttagtgtattaagaaattgcacacaagatttggccacccgcgtccagcagcattgtatggtgttcttgttctttcttttttgttctttgtagttatgacaagccttgggatgtcttgccatgggcatgcttatcttagacccacgccaagaatttgtaaggaagcttccataccacttttggggcattctcttcttcccacttttacataccatccttccttctcagtgttgcatactgcagacactggctgcttcagttctcatcactgacttccgctgacctgtttcctcagttcagtaggactgtgacacttgaagtttgaacttcatcttcctgtggcatatttggaaaattgtacctagcattgtgctctagatccagggcaacctttgggcttaccaagtgaatttttgctttctcagtgttgaatttcccttgtccaatgtttaaaagcctcatgtcgtatctctaactgtagtgtttagagttggagggctagtctaatactagttgctttattatatttggaagtaaaagtttgaaatatatacgtttagagattacatcacaggaacttgagatgtggttggtatgagcttagcgtgagaaaagcctggcttctatcctatgcatattagatttcataatcagataccagatctcataaacaggaatggatttaacaaggatgtattacaaacttttatttgaactgaaaaagaagttttaacatcatgagttcatccaatgtcctataacactggctctattcataggaagtgagtatggtagaatgcagtttctttgtagttcttaaaactgtgtagccagcttctctaagaaactaaaacaaagggtctaatatagcacttacaagaataacttactgtttttgaatactgcatgttttaggtgctatttttaaattttatttctattaactgtaataatatattcttcataatatcatctaatttatccccagttgactgagaattaagtactagtcaatactcaaacatttactagctattgctaatctatttaaatatgaagtcgaagtacaaatagatgaaataattttcttatagtggcatatctggtaggtggcagataaggaaacctgtggaaagcttttgccagtgtcaattcaaaaagtgttgtacacaattaaaaagttttagaaacacaacacatgtgaatttatgaatggaaggtagacctttgtggtatgtgagagcctgtgggcatgtggaagctcctacctttggggtattttcagatgtaattttattttagtcatgaccttcaattggttaacatatgcttcagagccttgcttcaataccagcactacaggtaaacttgttacatgatttcataataggtcactcttcatttttttcaatcatacttgccatcagactaatataactatttactcactagataactttccttatagaccacaagctccatccagcccagcagccagacaccctttctgggatggagtacttagtaagtatttgctaaggggatgactggcaggttctcacccttctcaacttcctataaactcagtgcaacaccgatgatttccttttttttttccctacttaaaaaaaaataacacacacagtaaacattattttaacagaagtttataaatcagatagccactgccacagtcatgatacagaatagtttctatcttcccaccaaacattctctcttgttaactctttctgcttaaactctacatacccagcctttacttaatagcaatcactgagagctggtcgtttagtctgggcttttctctcaatttccattttggtttctctgttctgtatctgttttaatgctggcttgcatgcccactttattaaatgatttaaacatttaaattcattgccatttaaccattcacatggagtcatttgagccaatgacttgaccaccaggaagaagagggaagtgagat

SEQ ID NO: 1717 - DNA, 4069 bp, Mus musculus
gtgtggaaaaagtccacaaacttagtcctcgctgcccgcctcgcctcctccggcccttctcggtgcccacgcacccccgatcgaacccgaggatgagcatagggtgtattttaggcgtgctgggcttccccgccccctctgcccacttagctggcaaaaagaaagccagccctataaaggaggccagggccaaggactggcctcctcccgccacgaggtcagacggcgagctctagagaaagaggctgcttaactgttctttatcatgtaacctcaaaaggaaacccagccgtcttctgatgctctcacgtacttgggggcattgtcgctgcttacagctgaaagcagttgaattgcttttacgtatttgtgtgactcgaatcttcaaatacaaagcttaccaagaagatcctgaggcccatgctgaacttcgccttttgatgttggctcgatgctgaagtcccgaggccaaccgcgtagccatccggtggcgcaggtgtctggggaccccgagcgcctagcctgggagcatgatcgtggacaagctgctggacgacagccgcggcggagaggggctgctggacgcggccggcgactgcggcctcatgaccagcccgctcaacctggcttacttctacggcgcctcgcctccttccgcccccggcgccggcgacaccggctacctgtccgccgtgccctccgcgcccggctcgcccggctccgactcctccgatttctcctccacttcctccgtgtcctcctgcggggccgtggagtcccgtcccagaggtggcgcccgcgccgagcgccctcaagttgagccccacatgggggttggcaggcagcagagaggcccctttcaaggtgttcgcgtgaagaactcggtgaaggagctcctgctacacatccgaagcaacaagcagaaggcttccggccagcccgtggatgagtttaagacacagagtgtgaacattgagcagctgacagacctgaagagtgcagtgtccgcagtggggaaaagaaagggacccgatcctctgtccgatggaccggtttgcaagaggccagctctgttgccttctcacttcgtgacatcaccgcaaacgcctacacctggggagagcatggaagatgttcgccacagcgaatccaagctggatagcagcgctgccctgcttcagaatattataaacatcaagaatgagtgcaacccagtttcactaaacactgttcaggttagctggatgagccccacggttccccagaactcgccaagagaccagtgccaggatttccatggaggccaggccttctctccacctcagaaataccaaccgttccaagtcagtggctctccacagatgatggaccaggcgtcaatgtaccagtattcgccacaaacacagaacatgcagcagccgccgccgctgccaccacagcagcaacatcaacagaattatccccacaactcacccctgcagttcagtccttactccagaatgtcccagtctcccaagtatgattccaacctctttgatactcacgagccacagttctgcacgggccaaagttttgtgtctttactgactggcccgggggaacccgagtctcttgctgttcccgttccggctcccaccagcattccaccccaaactgagactcagctgcagaccttcagcctgatgccaagcaatgcctgcgaggccgtcgtcggggtgcacgatgtgggctcgcactctttgggcacgtccctgtcactccagaacatcatgggaagcccgatgaataccacccagctggggaagtcattttttcagtggcaggtagagcaggaagaaagcaaattggcaaatattccccaggaccagttcctcgctagggacggagatggtgacacgtttctccatattgctgttgcccaagggaggcgagcgctctcgtatgtccttgcaagaaagatgaacgctcttcacatgctggacattaaggagcacaatggacagagtgcctttcaggtggcggtagctgccaatcagcacctcattgtgcaagatctggtaaaccttggtgcccaggtgaacaccacggattgctggggaaggacacctctgcatgtctgtgcggagaagggccactcccaggtgctccaggccatccagaagggagctgtgaggagcaatcagtttgtggatcttgaggcaacgaactatgatggcctgactcccctacattgcgcggtcgtggctcacaatgcggtggtgcacgaactgcagaggaatcggcagtctcattcgcccgaagtgcaggacctcttactaaggaataagagcctggtagacaccattaagtgtctgattcagatgggagccgcagtggaggcaaaggatcgtaagagtggccgcacagccctgcacttggcagcggaagaagcaaatctggaactcattcgcctctttttggagttgcccagttgcctgtctttcgtgaatgccaaggcttacaatggaaacaccgccctccatgttgctgccagcctgcagtatcgggtgacacagttggacgcagtccgcctgttgatgaggaagggagctgaccccagtactcggaacttggagaatgaacagcccgtgcatttggtccccgatggcccagtgggagaacagatccgacgtatcctgaaggggaagtccattcagcagcgagcaccaccatactaggtccactggcgtggagcctggttcagcgacactcactgtcagttaggcagtcctgatgtatctgtacatagaccatttgccctgtattggcaaatgtaagttgtttctatgaaacaaacccatttagttcactattatatagtggattatattaaaagaaaagaagacagatatctaattttcttggcagatttgcgtatttcatacccaggtatctgggatctatatatctgaatttgatcttgaatggtaaaattaccttcgataaccagtagctttcaggtagggaaaaaaaaaaagactcatgggaaaagacttgatctgtggcataaagccttgctcatgtagagattgccaggtccagattaggtgggcttgaaacatgaggtgaaaaatgaaagcatttgaaaggggacagaaatttggatgtgaggttgatgtgcactttgctgtcatcgatgcttctttggtcagatgcaggacctggtgtttaataatgctctctctctaggtgagggaggcctcttgataggatgtgatctttgaagctgtatataattctcatttttaccttttaaaatgttgtacatatttgatttgaaccacggacatttgaaatgtgtaagtcaatcaagtagaaaagagctagtgaattgttcaccactttcaaggttgtgcacccacaaagcaacttgtactgtgtaatcgtccagctagagtttttacagataaagcaaatggggaagtgggtcccaacgttgctgtggtagcaggcgggtttctcttgcattggaaacagacacgtttgtaggcatttgcgtattcttgaagagactgttttatgaatcacctcttagatttatgtaatttacctaagttgttgaagtttctgtttctccttaagagaaattacaaaaattcaacattgaagcatagtttcttgttttctgttgtcaaatagtaataatgtgctgtgatgtttatgcttattcataaagatgttttactttttagtgtaatgttagttcttttaacattattttgcttaaatttgataatgcccgacaagaatatattttgctttgatttatacactgattctttgtgacaaatatgacccattaaaaatgccttttaatagactaacttaccttttgtagctaggtactcatgttcttttttaaaagatgccctttggattggattggattgatcatgtttaactcagcgtattttatggatgaaagctaaatacagatatttggcatctctaaggtggaatgagcccactccacacactgataaaattcatgcatagttttaaatgaacattaataaactcatgttgtctt

SEQ ID NO: 1718 - protein, 729 aa, Mus musculus
PGSMIVDKLLDDSRGGEGLLDAAGDCGLMTSPLNLAYFYGDPSAPGAGDTGYLSAVPSAPGSPGSDSSDFSSTSSVSSCGAVESRPRGGARAERPQVEPHMGVGRQQRGPFQGVRVKNSVKELLLHIRSNKQKASGQPVDEFKTQSVNIEQLTDLKSAVSAVGKRKGPDPLSDGPVCKRPALLPSHFVTSPQTPTPGESMEDVRHSESKLDSSAALLQNIINIKNECNPVSLNTVQVSWMSPTVPQNSPRDQCQDFHGGQAFSPPQKYQPFQVSGSPQMMDQASMYQYSPQTQNMQQPPPLPPQQQHQQNYPHNSPLQFSPYSRMSQSPKYDSNLFDTHEPQFCTGQSFVSLLTGPGEPESLAVPVPAPTSIPPQTETQLQTFSLMPSNACEAVVGVHDVGSHSLGTSLSLQNIMGSPMNTTQLGKSFFQWQVEQEESKLANIPQDQFLARDGDGDTFLHIAVAQGRRALSYVLARKMNALHMLDIKEHNGQSAFQVAVAANQHLIVQDLVNLGAQVNTTDCWGRTPLHVCAEKGHSQVLQAIQKGAVRSNQFVDLEATNYDGLTPLHCAVVAHNAVVHELQRNRQSHSPEVQDLLLRNKSLVDTIKCLIQMGAAVEAKDRKSGRTALHLAAEEANLELIRLFLELPSCLSFVNAKAYNGNTALHVAASLQYRVTQLDAVRLLMRKGADPSTRNLENEQPVHLVPDGPVGEQIRRILKGKSIQQRAPPY

SEQ ID NO: 1719 - DNA, 53222 bp, Homo sapiens
  misc_feature (1)...(53222): n = a, g ,c or t
tatatatatatatatttttttttttttttttttttttttttttttttgagatggtgtctcactctgtcacccaggctggagtgcagtggtgtgatctctactcactaaaacctctgcctcgcaggttcatgtgattctcctgcctcagcctcccaagtagctgagattacaggcacctgccaccatgcctggctaatttttgtatttttagtagagacgggtttcaccgtgttggccaggctggtctcaaacttctgacctcaagtgagctgcttgctttgccctcccaaagtgctgggattatgggcatgagccaccttgcccatcctataggacaattatattctgatgttactttttcaaaattgaccgtgaactcactgagggcaaggactatatagcttatccatctgagcattgctggcttgtagcacctatagtagtgggcactaagtaggtgctaaggaaatattagttaaattggattgtcaacatttacttaaggcacttaagggaatatttagggatatgagacacatcttctttcctcatgggtgcacgtactaagtgatgaattatacagagttttttaggaataacaaggactgccactgattcctgggaccttcagaatgtctccaggcaactggaccttgaaatacaacttagagggagaaaagggaatttttaatttgcgatgctatctgtgttattctcatgatagagatggaagtttttctgtaggacattaacatgatttttcatctacagggtaaaattgaaagtcaaaagaaacagggttgcttctttcttttgcttattgcaaaaagaggtgtttgttttcatttttcaaaattacatttgaacttgccttaattttatttttaaaaacattcatttttaatcaacagataagtatatttatggggtacaatgtgatattttatatatatacattgtggaattagtacatcaagtaaattaacatatccatcacctcacatacttacttttttatagtgagaatatttaaaatctcttcttttagcagttttgaaatatatgatacatgattatttactatggttaccatgttgtgcaatagatgtctaaaacattttccttctgagaccttgattaatatttccccattgcacctacccgtctagcagccctctggtaaccactattctactctctacttcaacttttttaagttccacatataagtcagtataaggcaaatattgcatgaggttccacatcaaagacatctgtgtgtggcttatttcacttagcataatgtcctctagtttcatccatgttgttacaaatgacggaatttccccaaagaagtatttggttgctgatatgtgctcataaaacagaagttaaagcccatgtcttgagagaaataatatttatctgttaggagaataaaatgtaaatgccaatttgatttttataatttaaattatcataaacagacacttctcaaaagaagacatacatacagccaacaaacatatgaagaaaaagctcaatatcactgatcattagagcaatgcaaatcaaaaccacaatgaaattgtggttctcacaccaatcagaatggctattattaaaaagccaaaaaacaacagatactggcaaggttgcagagaaaaggtaacaattatacactgttggtggaagtgtaaattaattcgatcattgtggaaagcagtatggtgattcctcaaagagctaaaagcagaactaccattcgacccagcaatcccattactgggtatatacccagaggaatataaatcattctgccataaagacacatgcaagcaaatgttcattgcagcgctgttcacgacagcaaagacgtggaatcaacctaaatgcccatcagtgacagactggataaagaaaatgtggtacatatgtaccatggaatactatgcagccataaaattgagataatatcttttgtgggagcatggatggagctggaggctattatctttagcaaactaacacaggaacagaaaaccaaatattgcatgttctcacttataagcgggagctaaatgataagaacttatgaacacacagaaggaaacagtagacactggggtctacttgagtgggggagttgggaggaaggagaggagcagacaaggtaactattgggtactgggcttaaaacctgggtgatgaaataatatgtgacacattttcctatgtaacaaacctttacgtgcactcccaaacctaaaataaaagtaaaaaaacccaaactttttagacatagataaaaaagattgcaatgatcagtgcaaatagcaacatttcttggcctaataattagagaaaaatgggttattttgtttttcaggcatagacaggtgtagtgtagagtctatcactgatggtgttatttataatgaatgttatgtttatgtaataatttaaataataaacatgttagaataaaggcccattgatacaaaagggggcagagttcagtgaaataggtattccctttacatttatattgtacctttttgttgtacttaaaaaaaaattgttatttgaagccacttaataaggtataatcaaaatatatgtgcttggtttgaaggtttttatgaacttgagttttccttgtttcagatttagtggagtttaacttgggtagtcccaagaatgtgggtcccttccttgcagtggaccagaagcacaacatcctgctcaaataccgctgccatggtccacccatccgcttcacgactgtctttagcaatgagctccattatgtggcgaatgagctgaatggcattgtgggagggaagaacacagtggttgccatagctgtatggtctcacttcagcaccttccctttggaagtgtacatccggcggctcaggaacatccgtcgagcagtggttcggctcctcgatcgaagcccaaagaccgtggtggtcatccggacggccaacgcccaagagctgggacctgaggtgagccttttcaacagcgactggtacaactttcagctggacaccatccttcggaggatgttctcaggggttggagtatatctcgtcgatgcctgggagatgaccctggcccattatctaccgcacaagctgcatccagatgaagttattgtgaagaaccagctggacatgttcttgtcctttgtgtgccccttggaaacctagcctgtcttggaagggactggaggaatcatattcaatgaccttctcaattgacctgagttacagaaagtggccccagtgagagatgactgcccttaataagtataaaatttcaaaaagatctggacttaatatgatgacttataaggagcttagaaaatgcaggttacatttatatctacctataggattttatccaatgttgacttagccatggtagaactcttaactgcatctacacactatattgctcttgtaaccaaagatgctaatgagtgtatttgaattagcttctcctaggaggggtgactactttgctaaagagtatgaaaaatgttttgatggaagggacaagtttggttggtagtagagtgtttgtagcttatctggtaaaggaaattgagtgcatctgcatgcatagcacaagtaatccatcttctggcggttaactagagaaagcttatagtcagaggctcttgtgaatgcactgaagactgctgtgtctcaggagtttctcttgatgatctaccttttctgaattacttgaaaaggccaatgtgcttggttcgagttttttagtgaatatttacaatttcctgcttttatctagaaaagaagcaaaagggaaatatgaaagcagtatatataaaatctgtgctttggaattgatatttgcatttggtgattgttttttatttgattcagctaaattttatgtgttgaatacttactctagaataactacttttggaactggaagggggaaatctgtaaatggaaatttatttttatgttctgaaatttgagggtttaggaattgacttttgtgtaaagaatgctacggtattataaagctgtggaagttttttccactagtttcaggtgttttttttttttttgttgttgttgttattttgaactacttaccaaaattagaagttaaaatctaattagaaattaataagatactaaaattcatgacagttttttgtttgtttgtttgtttgttttttggtatttcttgatttgggcataaaaggcacacccattctctcatgcttggaagaagctgctattcctactggctatctaagaagaatggaattattaattttatttgacttattaattttaaacgagtttaatttgggatcatttagtaagtactcttttctttttgagctgtgatagattatagtctagtttaagttgctcctaagtagacagatgaagaaactagggaggctttagagaggaagacagatgcttgaagtatgaacaatatatacccttagaagaatgggtcaaataatttgggtttttaatttaaaataggagggccccagatcttactttcctgtccttgaggaacaccttcaagtttttaaagtattttagggggaaagaagatttttaattgtttctgagcctaatgaggtaataaaatatattaaaatagtttaattttaatggtccttacgctttacagtacctaaggatcacttgtagtatctgacaaaaatgcagaattaaagagtcatggcagggtgtggtagctcaagcctgtaatcccagcactttgggaggccaggcaggaggattgcttgaggccaggagtttgagaccagcctgggcaacatagtaagacctcatctctacaaaaaataaaaaattatccaggtgtgggccgacagtcccagctactagggaggctaaggcagggtgattgattgagcccagtagtttgaggctgcagtgagttatgattgcgccactacactcccacttgggcaacagacaagagatcttatctctaaaaaatttttgttaaataataaaagaattaaggccagggatgttggctcacatctgtaatcccagcagggattatagtctcgggaggctgaggtgggcggattgcttgagcccggaaggtcaagaccagcctgggtgccatggtgaaaccccatctctacaaaaaaatacaaaaactagctgggtgtggtggcaccacctgtagtccccgctacttaggaggctgaggtgggaggattgcttgagcccaggaggcagaaggttgcagaggttgcagtgagccttgattgtgccactgtactccagtctgggcaacagggcaagaccctgtctctaaaaaaaaaaaaaaaaaaaaaagagggaccatgnnnnnnnnnnnnnnnnnnnncttacccttccagggccttggggcccttttgggttttgcccaaaatccgaatttaagaatctcgcgcggggtgggtgggtccaaccctttattcccgcccttttgggggccccgccagaggttgttttaggccacgaattttaaaccacccttgggcaccaatttaagcctccttttttccaaaaataaaaaatttttcccggtggggccccccgttcccgcttctaaggagggttaaggagggggtttttttttggcccctaattttaggcccccattaatttttatttggccccctcccttccccttggggcacaaaccaaaaatttttttttttaaaaaattttttttaataataaaaaaatttaaggccgggggggtgggtcccctttggtatccccccaggggttttaattttcggggggttaggggggggggtttttttaagcccgaaagttcaaaccccccttggggcccttggtgaacccccttttttccaaaaaaatccaaaacctgctggggggggggggcccccccgtaagtcccccctcttttgagggttaagggggaaagtagattttgcccccggggccaaaaggttccaagggttccattaacccttttttgggccccggttccccctttggggcacaaggggaaaccccgtttttttaaaaaaaaaaaaaaaaaaaagagggaccatgatgcctctgggatttatgaaaccaacctttgtggcgagtgctcagtgattctgatgcaatggtggtattccacactgtgagaaacactaagagaagaggtaagatagaatgagggaataaacatggcttgtttattattttgggggatttaccaataactggtttaattctgttcatgatccaatagtattggtgatattagctccattttatagatgaggaactcatgtttagatctgaaataaggtatgtgagagtccatatctcttttcagctaaacttgtgagactttcgtaaagaagcgtttgtatttatttatttgtttttgagacagggtcttgctcttttgcccaggctggagtgcagtggcatgatatggctcactgcagccttgacttcctgggctcaagggatccttctgcctcagcctcctgagtagctgggactacaggtatgtaccaccatgcccagctaatttttgtatctttttgtagagactacattttgccatgttgtccaggctggtcttaaactcctgagctcaagcatctgcccacctcagcttcccaaagtgctgggattacaggtgtgagccactgtgcccagctgagagtttttcttgtcgtgaaagaacttgacatttcctcaaggatttataaaggaggctgaggagtaattttcccaggagaattttaaaaagaaagcgggcattgctcctccagtggtttggaatgatgccacttgattgtgcaaatgatttcttatgatcttgtctggttttctgttattttttgatttggtgacatagctctcaaagatttggtgacacagcttcttgagtcactttcatctctcttaaaaaaattttttttttaacaacttttaagttcaggggtacatgtgccagtttgtttcataggtaaacttacgtcatgggggtttgttgtatagatgatttcatcacccaggtgttaagcctagtacccattagtaatttttcctgatcctctccctcctcctaccctccaccctccaatagaccccagtgtgtgttgttgccctttatgtgtccatgtgttctcatcatttagctctcacttatcagtgagaacaactttcatcccacatctaatttgtctttcttcactctggtgtggaaattttgatagagattccaatatcacttaaacgtttcccagaatatttagatagaataatttagtttcttctgaaaagtttattttaggctagtgccacatggttgtgaatattagcatggtagccaaataatagtttgtttaaatgtatatttcccaatataaatataaggggcatcataatttttaaaaactataaaatctagaagaaaaatctatggataaaatccataattctatcatctgaatgcaatgaacattagcatttaggtatattttcttgcaggttttttaaccatatacttatagagaatatgtaatttgggtctgtgttttttacatataaatatttttctatgttaaatagtcttcataagttaattataaagatctgcttaatagttctgctactgcagttttcattattagataagttggtcattatagttggacatttaggtttacaatattaaagcagtggtttatatcaatttcagtggtttaaaatatgaatttctattttggaatgaaagtattaatttaatgtagtgaatctcatattccagaactgagatgattgatttgatgctatttgtgacagacagaacccataataaagcctttctatgcaagttacattttatagaattatcctactaaaagtaacctttcttcagcgaatgcaaaacagacctttggtgttccagtatgattcattttgccattctgaacaactatcattttaattaagaccatttaactgacacttcctggattcagttattaagtttcagattgaaacttgatccagtttaataactgaatccagtttcacatttatcaatctgaaaacttagtttgcagattggtaaatcagggtacttgacaagaataaatatggtacgcctttatatattcatgtgttacatgccagaaatgagtctgtttctggaccctgttcaaggaaatagtgatgactgagagaggtacagggaaataaacacccaagggaaacaacagaaataagcctccccaactttctaaaaaactgctcagcattatctctgtggattctgggtaaattcagctttttaacatcagctagtcactaatgccagaaattccacttcaagtgtatttattttcttgtgttaagcattattctacctggtttatgtctacaatgtagtattagtgtacttaggattcttgacacctcagtgtgcaataaataaaattttgaagttgttgtttttcatttgaaggtgagaccacagcccctgagtgctaaggggacctgggaatcctaggggaatggaggtggtggacgataagaggatggttgagggcaggagtttaaaggacacagaagctaggagagcagaaaatgtactccaccaccttctgtctaacttgtctcttaaaagtgcttttacattttaacttttttaaaaaatgtgggccgggcatagtggctcatgcctgtaatcccagcactttgggaggccgaggtgggcggatcacctgaggtcaagagttcaagaccagcctgaccaatatgatgaaaccccatctctactaaaaatacaaaaatagccaggtgtggtggcacatgcctgtcatcccagctactcaggaggctgaggtgggagaatcgcttgaacccgggaggtggaggttgcagtgagccgagatcatgccattgcactctagcctgggcaacgagagtgaaactctgtctcaataaataaataaataaataaaaaataaaaaagtgtgaacttaaatatatttatatgtgtgtacatatattttcttttttaatattctggttaaatgagaggccatcgggcctctttttaagagtctaatgatgtgtatatctaatgcccattccagctggattgtaacactgcttggggaagataacttaaaaaaaagtagtaccgagattacagcagctagtgtcctaaatggaaaagaagtgaaactaaatgtcataggagaaatcctttcagttttgtgcagtggttcatttgctgttaaatctaccccattaccattccccttactccttgaaaataaagtgatcttcatgttacaggaccattgctttatttatgtcacagatttcttgtcctttaattagtcagtgaaggcacatgattgcgatactactttttgattgccgtattgtaaaagctatatggtaaaaggtaactccctccacccgcccactgcaccctcacgtttaggggccacacagaaaaagcgaaataagatgaggtgaatctaatgagaaggcaactctaatgcccatcaggagattcactaggacattttaaaaggacgtctttaaggaaaaagttttgtttgtagatgttgcctctgattcctccctgcggctccagtccaggtcttggagccggccctcgaggggaatgtccgggactcgggtcggtacctttttggtctgggaatttccagtgtgcagaaaaaaaatccacaaatctaggcctcgctgccccctccctgcctcctctggccctcctcagtgcccacgcaacccggttcgaaagagaggatgaccgtattctgcattttagaaaacaggctcttagcttcccccgcccccgtcctcactagagtggagaactgaaagcgaacgctataaagggcgccagtgagaggggctggcctcctcttgccacgaggtcagacggcgagttcttagagaaaaaggctgcttagctgctgcttatcatgtaacctcaaaaggaaactgatcgtctttctcatgctgtcacgtacttgggttattatcgctgattacagctggaaacaattgatttgctcttacgtatttgtgtgacttgactcttcaaacacaaaggtatatttttattatctgatattttattaaaatatcttaaatggtaagattttttttttctttttctttcctattcccatagtcagattcttaactttggagtcactctcttatgtttgagtagccatacttgctttggggcaaaatattgggggatagttttttggagaaagaaaatctgggatgtttttgtagtttagtaatagcaagaatcatgtctgtttgctttaaaggcccaggaaggactgagatactaatggaggagatcgatagaatgggtgatgaagtatcataaatctaatgtaacactatcttctgtcagtgacctagaactatgatatcccgaggcagaagtctcccaggagatttgatgtgtgggtttagaggagtactttcccaccaaccgtaggcatgaaactatatgggaaaatatatcagagtaaattgaaatactttatagcatgccctcattcattcttacagctgtaaaattaaaatgtatgaatggccattttatgaatgaggaaaacctgaaatttgatgatttggctggacccccagattcatgataatctgtatatgttaaggggttttgtttgaataaaagcacatttctaaatagaatggattagagattctcttcattgggattagtgaattcgctgcagtggctgaaggtgctgtcccaaagaggatgacagttacgtaaattttaagcatttggtaatatatatttcctctatttaaatctgacatctaaagaaatatctggctgggtggaatatttttttgcttctgttagacagtaggttgtttagacaataaaaggagagaaaagtttatcctagtctcattcaccaccccgcataatccctgatggagcagggcatcagccacacagatcatctaaacaggcagataaccctgcctgtttatttatttggcctcagaatacggtgtatggtccaccacccctctccaccgtctttctaacatcatcctgctgaggccaaagacacagttgggcagggtacaggcgtggagcactgcggtggcagagtcagtctgagaggagttagcacatgacatcagtgcacagtgcagatgacggaaacatttggcagcatcctctccagtgtggaggtgatgaccgaggtcagcataatccagctgttcagatacagacttttcctcactgaggaagaggaggcaaacccttctctttcttgtcctgtaacagacaagacaagaaagctctcagagagcaaaacaaaccctttcagaagctacagagccatggaaagcattactgaggggaaagattttctaattgttctgagaccaataatgaattgctcctgaaaacaccattttcttttggctcatagctgacactgatctggaggcctcttgatttttttctcccaggttaacaggaagatctcgagggccctggctgaacttcaccttttggctttcttggcctgatgctgaactctcgagggtgagaagggctgatatttctaaacaagtagcatccaggtgttacctagcttctggctgatgtcaaaaagggcagtgggatttttctaagatttttctcttaaattagacatttttttgaagttgctacaaaattactatgaattttatttataggcattttactgtgatttcatgagaactaagattttttgtgtgtgtgtgtgtgtgtgtggtttagtagtatttttttaaaccaatttgttgaatttctgctattttccatagcaagaggacatatgaatacatctaagaggggaattcagctctctgcttactgacagtttcagggttatgtaatctttaacaggcttggagagcatcatgccccctctcagttttggtgaagaggctccttaaaactagcatatgtggtttctgattaaagcactttctgttcctttaatttgggattgtctgtgaagtaaaataccttcctttcaaccgtagggaatgaaaatatttactgccgctgatggagttagtggattgggaattaacacttattaaacacttgttttgggagcttaccagcaagatctcatttagccctacagcattttttaggtagctgtaattagctttattttatttatttatttttgtaacttcaacttttattttagattcagggggtgcatgtataggtttgttacctgggtgtattgcgtgatgttgaggtttggggtacaactgatcccatcacccaggtactgatcatagttatttttcagcccttgctttcctccctctctcccccatctagcagtcctcagtgtctttgttgccatctttatgtccttgagtatccaatgtttagctcccacttaaaaatgagaacatgtggtatttggttttctgttcctgtgttaattcacttgggataatggcctccagctgcatccatgttgctgcaaaggacatgattctattcttttttatggctgtgtagatttccacagtgtatacgtaccacatttcctttatctagtccactgttgatgggcatctaggttgattccatgtctttgctattgtaagtaagtgctgcagtgaacatacaggtgcatgtgtctttttgatagaatgggaaatataaccacgacaaatggtgaattctgtcatggttatattaaacaataatcacaatgctacattctctatacatgataccaaatatctgaattaaacttatcaaaatactgttaattacctagatgttatatctataaaatgccaacctccagatatttggagacattaaaaatgattttttcactgtttgttcagatatttagcaacatgcaggcacttttaatattggtagaagacttttggatatgttttagcattgagtagtttatgtgcatccccattcctctgattgtttcagtcaagtttgctagacagcctagtactgtgaatctgtagagggtctaatactgtaaatcatgcgttcttagagagggtgatattatctccaagagggcaaaaataggttcttcagggaaaaatcttagctattacaatagtttgtggcccccaaagggccatagtacataatagatatacagtatatctgtgatattaaactttcatcaggggatgattaggaaaaagatgtctaaaaagaccctgtagtggggtctaatactgaaagaaaggttgagacatgtcattgtaaatgctctggatgtacttattcaactgaggtcaaaagatttttctgtggtttgttgtctttttgtgtcttgctttgtgtctacatcctcatttttcatggattttaaaagtactggtttccagagggggaacaacgtttttagtttcttttcttttctcttttctcctcctcctcctttttctccttctccttcttctcctccttctcctctttttctttttcctctctctctcctttctttttttttgatacagaatctccctctgtcgcccatggttggagtgcagtagccccttcttggctcactgcaaactccgccttccaagtttaagtgattctcatgcctcaacctcctgagtagctgggactacaggcacatgccaccacgcccaactaatttttgtatttttagtagagtggagtttcaccatgtttgccaggctagtcttgaactcctgacctcaagtgatccatctgcctcagcctcccaaagttttgctttttttttgagacagagttttgctctcccacccaagctggagtgcagtggcatggtggcatgatcatagctcactgtgtcctctaccttctgggctcaagtgatcctcctgccttagcctcatcagtagctgggactactacaggtgcatgccagcatgccaagcttctttgttcttttttgtttctttctttcttttttattttttattgtagagatggggcttgctatgttacccagactggtctcaaactcctggcctcaagggatcttcccaccttggaccccaaagtgctgggatacaggtgtgagccaccatgcctggcttcatatttatttcaggaaagctttattgattatatccttaaatactttaaatatatatttttaaattgtgataaaagatacataaaagttgccatcttatccatttttaagtgtacagttcagtgccactaagtacttttcatattacaacttttgccaccacccatttctagaactttttcatcttccctttgactgaaactgcatatccattaaacaataattctacatttctccctcccccaagtccctggcaaccacccctctactttttgtctctatgaatttgatgactctacataccttatgtaagtggaatcatataatacctatcttcttatgactggtttatttcatgtagcgtaatattttcaaggttcattcatgttgtataaatgtcagaatttccttcctttttaaggccgaataatattccagcgtgtgtgtaggtgtgcataccacactttgtttatccattcatctgtccatggacacttggattgtttcttttggctatcatgaataatgctgctgtgaacatgggtgtacaagtatctgtttaaatccttgctttctttacttttggggatatatcaagtcattctatgtttaattgttttaggaactgccatactattctacacagtggatgcaccatgatgaatttgtttttaattcattttgtgcagtatttggcacagtgcagtgaataagtgcgtacaccatgaatatgtgatagaaaatgacacgaagttctgagtaaatctgcgcagtgattcggcaccactattaaaacactgtctcctatttattcacccttgcatgtccacatactacagtgcacacacttatgaagatgtgcatggttgagaataactcctatgagaatcattgaggtaatgcacttagattccatgtgggtcagatctttttggaaatttggaccgctggcaatgcagttccacatcttaaacctagggaggcttgctggaggtttaaaagggccagagctacaaaggtgatccatagatgtggggattaggtcttgtgaatgaagatgaactgaggacactttgaagataggaattgtgtgagttctgatttttacccttctcctccccttccacacccattccctcacctctgtagcatagcacagggtgacttcataaattttggttgaacaaataacccagggtggaaaaaaaatgaaatgatgatttattttttaatcataacagctgtgaaaagttgttctgaaggccataagaactttctatgttgtatctttgctatgggaaaaggaggtgcgtttaatttgaggtggaagataagagtttggaaactgaaagtgatcactgggcaaggctgccaaatttacccttggcatttctagtgtcttgagagatgagctgtctgaaagatggcagaggctgatatatcatggaccttcccaaccctgctcttctgtggtaaggtttcgtatcttgtaaacagccaatgaaaacagttctgtgtgtttacctctagtattgaacagtatccagcatttagataagaaagggattgttaaacccaacagtaatgtcaaaatctagggcagagtgacagattgcagccaaattgaagcaggcaggaggtggactgggtggtgataataatgttaaaggacatgctttctccaccccatacctcacttaggtttgttggctctccaaacttcatggttgttcatttttgggagcctctcttaaaatgcaaataacctttaagaagggttactgttgatgccttggtgggaattaatttttagattctttcttgaaattttactggataagtagggcacagagactgccccaatcagagtgcagataaggggtgaggtagagtggcaggagcagtgcagggaacagaatgtgaaggttaaaatcagacttggtacctccccaactctccttcagctggctttcttgtttctgttctttgtgccaccactattatcctcaaggccttggagttacctctgaccctcatctctcttttccctgccctgccctgcccttcccttacctccttctctctctctctccttctctttccttccttccttcctttcccttttcctttccctttcgctttcctttcctgtctcactctgttacccaggctggagtgcagtggctctatcttggctcactacaatctctgcctccggggttcaagcaattctcctgcctcagcctccagagtagctgggactacaggcacccgccaccacgcccggctaatttttgtatttttagaagagatggggtttcactgtgttggccaggctggcctcgaactcctgacctcaggtgatccacccgcctcagcctcccaaagtgctgggatcacaggcgtgagccaccacacccggcccctcccctgtctttctgtgttcagtctcttgcctatagattaaatgtgtgaaatctctaaacagttcccctctttccatgcccaggagcaccacttcagttcagacctccatgacctgtcacattgactgttgcagagtctttcctgatcacttccacacagctgccactgtgatcgtgtttttatcttgttcgaaacccctgaatggctccccatcacatctgctgtccattgtttgcaggcagcatcagggccctgaagggttccagacttgactctgtggtcctcctcttctcctatgttctcttcaagttgggccgatggtccaaagaggccaaaatgcttaacaatgaagtattaattagaactttgaaaaatgagtaataattataactaccatcattgagtgtatattatgtgccaggagttgtgctaggcatctcatgacactaccacgtttaacctacctactagctgaatgcagttaatatacccattttatggatgagaaaagagtcttagagaaattaattaaagctggatggttattaagtgaatggagcttggatttgaacccaggtttgtttaacttcagaaccccatgcttttaatcaagggaagaagaatattacaggcaagaattctagcttgggtaaaaatttggaggcaagaattagtgtgctattttagaagatattcataaggactgcatgctgaagaatagagatagaagtatgatgggataatgttttagtttgctagggctgccgtaacacaataccacaggctgcgtggcttaaacaacggaaatctgtttctcactgttctgggagattggaagttcaagataaggtgttggcaggtttggtttctccgaggcctctctcctgacttgtacatggccgccttctcactacgtcctcacatgtggcgttttctctgtgcatgggcatccctggtgtctctaccctcttataaagataccagtcagattagatgaggactcaccccgacagcccatttttaacttacactctttaaaggccccatctccaaacatagccacattctgcggtactgggggttaggacttcaacatgtgaattttggggggacaccattcagtccataacagataggtttgatgtagcttgattttagaggatgtgaaaaccaggcacagacatttagctttgatatggaaggtcataaggtccaattgtggttcagcaggggaaaacatgaatatcattgcttcctcaagcaaacttctagctactcttaaacataaaggtagttagaattagtagagtactaaggggtgaatggggaccatttcggagagggaactattaacacttttctatagtggaatgaaagagtagaaacagtcaaatctttaattcctctagaggtttctggaaaaatgaagataatcctttggtgagggtagagggacagagtggggaatatggcaagtttcattttagacttgattatactcttggcaacatggaattagaactcagagaaaaggtcagagctagtaataggaatcaactctagacaggtcagaactgaacctgtggaagtgggtaagattgctcagacttcaaaaaggacaagagacaagaattctcacatctgaaactgctttgttgtcacactggtttggaggatagtagggaggctctccgggaactctctacgtaaaataacacctctggctttcttccttgaccttgctttgcttttcttagcacatcatggccacctggcattatcttatatagctttttgattattgtctgtctttcccagtagaatgtaagctctgtaagggcatcgatggcctttctgttcagtactgtattcgcagtatctggaagcgtgtccggaacattgtaggtggtcaataaatatttactgagtgaatccatgaataggtgaatttctataatcgatataatttaatttgataattagattgctggatatttcccttttatcttttcttaaagtaaaaatttgttctttaacaaatgtcttttaataaatgaacgtacagacacatatgtttgagaatctctaaatatccaacctaaaaacttgggtttgtttctgtgttttcccttaacttgtactttccccaaaccaagatcacctggtctcttctctgctacatcatttctttatgacaaagtagttatgactctctttaaaaagccaggcatttcagcactctggttactttgatcagattatctattcgtatctacttttatattttttgtaactttcataggttatttgtggagtccttggtttctgtgaggtctcttttccctgtatttaaagattcccatctcattgtaccgatgtgggtgccagatcatatgaacataagaaatctgtttacaccattctccattcttttctctgggagtactgccaattatgggatggtgtgatgaagtcataaaatacaaccttaggtaggataggcatttaaaccaagtccactctctttcctttttctaagggatcataatcaaaggtaaatgtgaatctacttgtattttatacaggtgaagactcagtaaatctagcttttctttctcactagtctgagtggtatacctggcactagaattattgtgttaagtcatttaaagcagtgactcttcagcagatggggaattcctccttaaaggactattaaaaaatcattgaggaagtgttttcaagggccacacatcccctttttgaaaatcatagtgggtgattgagccacagcacttagcttgagcaacagagtgagatcctgtctcaaaaaaaaaaaaaaaagaaaagaaaaaagaaaaaaaaagaaaaatcatacaggccacagagcacctttctgatggggcatgccatacctgtcaggtggaaaacacagggttgagaatcacagaagaaagaatctgagagttaaactgaacagagaacatgtaaaacgaaagggtgtctttgttggtttccatcctctcctctttactgccgaattaacttttggtcccccagaccccttgtttactagaattttatggacgtttaacactgtatggaatgatgtaggctgatgggaagaggacactctgcagggcaacaggacaagtctataaaatccagaatcagattaggagatgaaattctgagcatgattgttggaaaacagagaaaaagagaaggacatcgacaagagaacctgtttactgaacctatggccagtttagtacatctttaagaactgttcactgtaatagttgtctgacttacaaattctacagttatgatatttttataattatgctcttttgtaatcagtttgattgcatacgtgtgaaagtgctctgggagaaaaattcaatatagatgcaaggtatgactaacagcttttgtccaacctgtaatctatcattttccactccctgtagccatatgcacacaaataagagggagatttactcaatggtcataataatttatgggaacaggaatggaactaacacttattaagcatctaggatgtgtcaagtacttgacatacattgtacattatctcatgccatattagaaatttgatttagatactagtatctcaatttataggcaagtaaactgaggctcagagattaagagatttgcccaaggtcacgtagctggtaaatgctacagataggtatgcaggcttcaaagccatgacactgcagtgcctctaagcacttttgcttaaagcaagggttggcagactttttctgtaatgggccaaatagtaaaaattttaggttttgtgggccaagagacaagatggaggatattatgcaggcacttatataaacatttaaaatgtaatcattttaaaatgtaaaaaccatttttaggtgacagctgtgcaataggttggatttggcctgcaggccgtagttgccaactcctggcctaaagtatccagaaaatgtaagcaaaagcaattttggggaggtaaggtgattgtttgaataaataattgtcatcaactttgtattaaatttgcatagtcttttagtaactgagaattcagttttcctcactaattccagtattaaattatcccttcataaaattcttcctgttgatagctatgcatgtttgatgtattttgtctgttagtatgcattgtgtttggcaagatttcataactgcatattttacctcgctctttgaccattctcccagctgttacatacattagagataatgtgtgtatataaagtacatagtattccgcatatggcagatattaaatagtggtagctattataaacattatcagtgttccaaagtattattatattatggatctataatttattattttgttggtattaatatatgttacatatgatataagctgatttctcctcagatcttaaatatttttataactagtctttctgtgtggcacacactactgtccttgtttacagaaattcaatataaatccctagagacttataaaaacaaacaaaaatttcttaaaatcccccaaaacaaaaaaacctcaagttttaaattctgaattaaaagttccagaattaaaattcttcttgaaaaaatgtggcatataaggcattcatgcctttaaataagacataaaattatattcttatccctcattcagtttgacaaatatgtgttacctgtattaaaaagggaagggggaagaagattttggatatgaaagttttgcaaaacataaattctaatcaacatgtttatgaagcaactatgtactgaacatttacaagtactgtacttcatttctagattagtgagctcaatttaagctcaatttaactcaccttccaaatttagccttttctttgggggaaaagaggtttaagtcaaaatataaaggaaaagtataatggttagaagtttcttagctttaggcctttgcagatccatgtaggccaaacctcatacaaaggaatggtgaagggtctttcgtcaaaaattttcttaatttctgtggatcctaaaattcaactataaaatattcagttctttggggttaattgccttcaaaattttttttctccttaaaaagtaaatattaccaggaaaagtaacagttatcatttatttgtagtacaatgtaaattagcttattagttttcttcctgaaaactgagatcctttcccagagcatgtacattttttacagtagaagggtacagggatgggtaattttgaactatgtattactgtctagaatctgcggatttgtgtaggaaagagtgtcacaaagaagaatggagaggaaaaaaggagggagaaaggggagttgggattagaagatactttttggtccttcaccattctgttttaaggcagttcagattttagtgtcctttaaagcaggcaagagttgacagtattcccacattcagtgtttaggaggatgctttcattcatatgtgtggaaatgaaacttttggagttgtcaacaagtcagagaaagcagaagaagccatggaacttgtaatgctctctgcctttttggacaaagctcacctacttcatttttacctcttggtgtctatagtgggtaaagttcatcattataaatagaaaccagaaaacactctcatgagctaagaaccatttacagggtgaaagttaggaaagtgcacttgtttcatgtggatgttttgtgtgagttttgattattactattagaaagtgtggtacacaggtagcccttcagactaacaccaaacatcactccttcatatatatgattttgtatgaaccatatgcattttatagtatgtggatattttctgaaatcaaatggaagaacttttcatttctttagaaatgaaatgttaaaggggaagaaaaatttgttttgttttcagtttaaacacttggatttctgctgggctagaaagatgggatgctgcaaaggtatttcagggtactgtagcattgctgtgattcagggtctgtttataaggcatctgtttattgggatgttcaactgtgtgacctgactttgtgcaaggtgcctctctggctgcccatcaggggacagaccttgtgtacctgctggaaagcagtggagttactttacatagtggacgactcactcacacctagtgggtgctcagaaaatatttgtgaagaggacaaagtggtatatggcatctcctttgatgctttcatataaaaggaagttgcagagagatgactccggggacactattaattttgtcttcacacaatcagtccataatatgcaaagttgtacatactatacatacagtacttaacggggtatcaagtttattctcttagcactgagcaggatgttctgagatgtgcaaaccttttgctaattcatctgtatgatgattaggttactggttggagaaatttcctcaatatggtatactgtgctttgatatcaggtgctaataatttgctgcaaacaggacctagagaattacttttaaagacaaccttttgatctttccagattaaaacatacaaaagaataggttacactcttgtaaggaaaaagcttacagaacttactaactacagctgtctgtgccatagcctggttggtcaggtggcctattgggaagtatataagtgccagtagaactgagttcatatgtctcagaaatagtaattgtttctattacatggataccatatggaccagaatgttcatacagccaggtataagctccacaaagacagagattagtgtttgtctgaggtaccgctgtgccccagtacttagaaaagtacctgacatttataaagcactaccatattgaagaataactagaatttgaaaatatgtggtctgatttactcatctgcattagaaaaatctgttagaataccctgaagtttaaatgtttcttgagatgttgaagtatgttttacattgctatggggataataaattattatttttaaggaaaagcattcaacaaatcaacatataagatgatatctgttttgaaagctcctgaaagattttatgttctttacaaagaattctgggcaaaaggcagctgggtttttatatttacaagatagatgaaaatagttttataataatccaagtgcagagaatgaggagattctaattcaaggggccaaagtatttgttttgatgtctgtacggtattgacataaaataattttggaagcatttccacttgtttctaccatccagttaaatatgtaccaagtaactacctactaagtaacaggtacttggctattgacaagggatacatgtcttgggagcttatagtggaatagaggagacagactcataaatggttaattttagcacatcctaagagctatgatagaagtctgtgtggggactgagaggaaaggcccttagtccagaagtggggttgagagttggggtcaggggaggaagggagggtcaggaaaggctccagaagtgttggatattaagtgagtcttgagtgagtgttgggtattaagtgagcatgagattttggttgaggaagaggagagaagaacagcaagagcaaagtctcagagctgtgggaaactatactcagtttcgtgttactgaaggtaatgaggaagatgaagcttgtgaggaaggcaggacttggacatctgtcattctaagaagactggactccatgctaaaagcagtagagagccactgaaggatttttaaatagtgtagagcaagcttgtccaacctgtggcccatgggctgcatgtggcccaggatggctttgaatgtggcccaacacaaattcataaactctcttaaaacattatgagattcttttgtgatgttttttctttttcttttttcattttcttttcttttcttttttttttttttttagctcttcagctgccattagtgttagtgtattttatgtgtggcccaagacaattcttcttccagtgtggcccagggaagccaaaagattgaacacccctggtgtggaggaattcttagaagaattcctggcattccagcattccattggtatgccgatggcagtctggaggatgggttttaagtgggcaaggctggatgggtgatcatttgcatcaagtaagagataaaggcctgtcttggatagtggaaattagagatggagaagagaggagggtttcagaaccaggtgttcaacaattatgagtccaatctggaacttttgagttgactgataggacattgcctacattcgatccctaaaaattatttaaatctgtacttactaatttatttttaaaaactgtattttctaaaaaaaaaaaaaaaaaaaaaaaaaaacttcatgcaaacagtattgtttcacatctttgcaaatttcttaacatccggttttacagaagacagattttcatatttgcttctgcatttaatttgttgcagttgaccaggtgcaggggtttacgcctgtaatcctagtgacttgggaggctgaggtgggaggatcacttgaagccaggagttccagacaagcctaggcaacacagccagaccccatctctacaaaacatgaaaaataaaaaaaattagccaggcctggtggggcatgcctgtagtcctagctactggggagactgaggtgggaggagagactgagcccaggagttagaggttacaatgagctataatcatgccattgcactccagcctgagtgacagagtgaaaccctgtctcttaaaaaagaaacatgtgtcacaatatcttatgttggtgaaagtataaagaaaatctggtctcatacacaaatgtagttggtaaaggaagaaatagcttaatagtcttttcaggtaatttggatattctaatttaatattataccaaaacaagtggtagttccttaaaggagagatgcaagatggaacctgaaaccatatcaatgaactttttatcttctgatgcattaaaatccattggccacatcttctgatacattaaaatccattggccactttgaatggctctttcacccatgtgtgattttataatgtcttgcattgttcatttggaaattattagttaattgagttatgcaaattttctaaatgttgccacatttcattatataatataaaaaaatcacatttgttaatagcgcatcatcactgggctcatcaaaaaagtcttctagaactaggaagctatcaagctcaaggtgtccaacagaagtttcccaaaattgtaatttttattgaaaaacttgaattttattattggcaacaaatactgttattttccttaacatgacaggctcactttgttcattaaaacacaaaaccaaaccaaaccaaaaactgacaaatacctgagtctgaaacagtttgtcagtcaagtataattggtgttccatgaaaaacagagggcagttcaactcacaactcaaacagtatttgattagaacaaatggcaatgacatactgttcaagctaatagacaagtgcatttccttgagacaattgtcatatttcaggatgcagcacaaacttctatgcatatttcccatcttgccacataaaatattaaaatgatgtatacaagagtcaattaatattgttactgcttcatccaggactttttaggtgaaactggcttttattctttttctttctgcaagtagacagtggtgaagaatacaatgattactagttcattttgttgctgctgccttgatttgttttaaggcaccattagttatacccattgcttttgtaccatcatttcaaatgtaaacacaattgtttcaggataaatgatgagattcgaaaagttattgtacattttgaatgtttcagcattccttgtgtttgttgtcatgcattaaaataaaacacctttgatgactggccggtgctggaaatgaatataaccgaaatagcaagtccagacagtccatagatctatccatttctaaggcaaaagtgcaattttgcagacaaaaccagtttgcagttaagtctttaattcagtgagctgctgcattgttgcaaagtggcagtgctgtgatttcttttgctgacttttcatctagaaaatattcagcaaaataaactctaccaggctttattggtctttcacctatgatgttcatttcttcagccaaagcagtacaataacttatcctgtaagatactggctttttcatctcaagtttgaaaagctgttccaaattgtctttggcttttcaaaagttcattacatctacacttaaaaatccaattctggccgggcacggtggctcacgcctgtaatctcagcactttgggaggctgaggagtgggggatcatgagatcaggagattgagaccatcctggctgacacggtgaaaccccgtctctattaaaaatacaaaaaattagccgggcgtggtggcgggcacctgtaggtccagctacaaagaggctaatgagttcccctaaggnnnnnnnnnnnnnnnnnnnnnnnnnnnnnnnnnnnnnnnnnnnnnnnnnnnnnnnnnnnnnnnnnnnnnnnnnnnnngtcacccaggctggagtgcagttgtatgatcatagcctactgcagccttgacttcttgggctcaagtgatcctcccacttcggcctcccaagtagctgggaccacaggcatgtgccaccatgcccagctaatttttaaattttttattttatgtagagatggggtctcattatattgcccagactggtcttgaacttctgggctcaagcaatacttcctgccatggcctcccaaattgctgggattacaggcgtgagccactgcacccagcccagccctcaattccttttttgaaactctggattattggtctcaagatagtgttacaatgttaattgacaccataaaactaaaaaatgttctattgcataagatacaataaggtaaattattaacatttataaagcctggggaaagatagcgttctcatatttttatttcttctttacagtttcttccagtagctttggattagatttctcccctctatgagttgtcacagaactctctgatgtatcatttcatctttttcagtatctttagatgtagacagtacctctgagcctggagtaaatgaatcctctaatctcgttttttaaagcaaaagatgaggcttcagagtcagttagatgaagatttcaatctcttctttgctttcgatggagcagtgtaactggacaaattctcaaggccccatatttcgtatacagtttttgtgcatcagaaatctcttgagtgtttttgagggttctggttcaaagtgtctcgtaagactatagtcaagatgttggccagagctgcagtcatctgaaggcccgatgtgcagctggagaatctactttcaaagtagctcactcacatggcgggcatattggtgctggctgttggcctcagttgacttttccagacagtgtcctcgtaacatggtggctgtctcccacagcatgagtgttcaaccatatttgattagaacaatggcagcatcctatcattcgacttaatagatcaaactgaatttgtatttcaacatttacataaagcaaagtacatttaaatttttttgtagcgatattaactgtttttgatgtgtatgggagggcttctgggcattgggggttgtggtcttgtcaaacagtactattgctttggcattgcacagaaaacttcgttttgaaacattagtcttttgttgaccatcttggtctagattaagttctccagaggccatgaatttgtggcttgaattttcatatctcatgtaaaatgggaagataattaattaaaacaggaggataattaattttgtaaaaaattactttctacggatttatttgaatgggcatttaaatcctttattatacataaaatattggtgggtagaaaacaaaattcaaatagattttattgagaaactctaatgtattagggttctccagagaaacagaaccaatagggtacatataaatatgtagaaagagatttattatgaaggattggctcacacaattatgcaggccaacaagtcccaccatctgccatccataagctgaagaaccagaagagctggtgatgcagttctaggtcaagcctgaaggcctgagaaccaggtgagctggtggtgtaagtcctagtcagagtctgaaggcccaagaaccaggagtgctgatgtctaagggtaggaaaggatggatgtcccagctcaagaagatagcttcaggctttttgttctattctggccctcagtggattgcagaatgcctgcccgcattggcgaagggggatcttactttactctgtctactgattcaaatgcaaatatctgccagaaacactctcacagacataccccaaaatgatgttgtaccagctgcctgggcatgccttaatccagtcgaattgacacatcaaattaaccatcacactcaacatcttatttggagcatcttttaaatgattttggtttccaaggaattgcaattactgaagtcttgtgttttccacagataaaccaagggatttgttttcttttttattttttaaagttatcaaaaagttggagggagaggcagcaagaagttttagggaaatacacttgtgagaaacaaggaaatacagtcatgcattgcttaacgatgctacattctgagaaatgtgtcgttaagtgattttgtcgttgtttgaacattatggaatgcacttgcacaaacctagatagtctagcctgctagtcacctaggctctgtggtatagtctattgctcctggtctataaacctgcacagcatgttactgtactgaatactgtaggcaactgtaacacagaggtatttgtctatctaaacatatggaaacatagaaaagaaacagtaaaaatatggtattacagtcttacaggaccaccattgtacatggagttcattattgacttaaacatcattttgtggggtatggctgtatttactttggacctacccccaccagggtcttatgccacctactaatactgagtaacaatccaaactcatcgtgtcccccccttcgtcctaaaacccaaacattctgctctgtgatcccttgtgatctggagctggtggccctgttcacctggtcgtggctccaagccatggcctgactggggaccctttcatttctccccccctccaaaagagcgagacctgtgggttctgccctagcaatgctgcccagctctgctttctgtcaatttactttctcctttcccactgtatctgccccagtgcccagtcatttctctcctgggctactgcagtggatcctaatggcctctgggctcctcatcttctctcaactgcttgcagattaattttgcctacctaaaattcatgttttctcaatgtttattaaataaaattccagtgtctcagctgctggaggtgctccacccaaaggcaccaagttatcttttatatttaatgccatcttctcctcttgacaatcgtaaaaggggactatacactctaatatgaaccctctccttaattctttgctcttgttctttctgtaaatgctgtgggccccaatcccacccatcctttaggacctatcttaaatgccaccacccctgcaaagattttcctcctgacctcctttttcctctaccagacctgttgtttctccttttaggtggctcactgaactttgtatccctcgtgttatttaatcataatcggtttatttaaacatagcatgtgtgtacttaaccttatcattcccgcattttttgctagttggacttgaacaaatagttgtataaatccattggaaaaaagtattcaagataggaaaggccaaaattactgtgttagtttatcagatagtgtaaagctatgcagaattttaaaagttatatctacatatactacagcacctacatgtttgtgtattattttgctaagatggctttgttctagtattgaaggatacagaagtgtggcattactttttattcatggctgcacctaaaacattatttgcgtcccagcagataatttgagaacataaaaatgctccaacatctctttcagttcgggatgttgcctaaaaccgtcgacaaacgctatgtttgagaagggaggctacgctggggcgccggaggagacaggcccttaagaaccttccagagatgccttaactgggctaacagctcgccgcgccggggcaggcagaggggtgcggggcgcgctccttccaggacttgccagtccccaagaaccaggccaaccggttccctccactgactcccgcctccctctgcaggcccagccctgcgccgcgcgccctctccccgggcgcccaggcccggcgggggcctagagggcagggatggcccgggcgagggacggggtcccggaggcgggaggcgggaggcgggaggcgggaagcgggaggctggaagccgcgcgctgtcggggtttcccggtgaagggcaggcaaacaaccggtcggtctgggcggagccgggcgggcggggcgagggcggagggcggagggcgcattgcctcatcctgtacattttactggaaatcggacgcatccggaggaggggctgggaggcggcccgggcaccgccaatggccgggccgggcgccggggaggtcggcgagcgctgcggcccgttaaataccctggcagtcccgcgccgcgcccgtactggcccgcgccgtccgcccgccgacagctccctgagccagcccgggaggcagccgcgcgcagcgagccggtggcgcaggtgtcggggtcctcgagcgcccagcctgggagcatgattgtggacaagctgctggacgacagccgcggcggagaggggctgcgggacgcggcgggcggctgcggcctcatgaccagcccgctcaacctgagctacttctacggcgcgtcgccgcccgccgccgccccgggcgcctgcgacgccagctgctcggtcttgggcccctcggcgcccggctcgcccggctccgactcctccgacttctcctctgcctcgtcggtgtcctcctgcggcgccgtggagtcccggtcgagaggcggcgcccgcgccgagcgccagccaggtacccgccggccccgcaccgctgcgtactcggggcgcgcacgcctaggaggttgggagcgggactccccagatggagggtggcccctgcgccctccttagagctaggacgtacgcaccttagccatcaattaccactccccgccttgcccgggccgggcgcctgcctgacctacacgcccttcgccggcccgcggaaccggctccctcccgcgggcctcgggggggcttcagaaaccgctcggccgagctctgactgccgggcgagtgaccaggagatcgctcgctctctaagaagcagctttgttgagtcataattaataaactatgatgagatttggggtctgatgtaggtgtaattttcttcttgtgaatattttagtggaaagctgtagcagaggataagggtttgggaatagcgttaaaggtcatgacttatttctcagtttttatggaatttttcagtaaaaagacttgaccgtcaaagaaaaggaaactgctgttatcaaggtgaagccgggctgaaaaccaactcaagttatgcctttagtttggcgagtttcggaagtctgcccggaatttttgcggtcttgtttttgttgtgtgtgccttaaaaaaaatggataagccatatctagcagagaaagacgtaatgttatctttcatgggctgcgaattggtttcctttcttagtgaaccgagttgcataatttgggggaaaacaggatgcccctgtgggtaggctagaaaaacgcctcgataattgaacgttgagagtaattagcatgattttaaagaacgtctctttccggtgtttcccactcttagccactcctgttttggttgtcatttattttaaaaagtgatatctcattttcattttaagtcatttaaaatcatgcgaaaagcgatttaaaccactgcgtagcagatccagaaagaatatgtgtttaggaccttttcttccccacttggccttcatctggctgaaactgttctgctggtcccttggtttaccacacagccacaggggatttctgaaactgcatttttttctttctgtgacgttggattatgaactgctgtcattccagaaaaatgctgtgttagattctggcaattctggtatctcttgaaatccctaaacttaaaaataaagccaactaatgtttcacttaccctatcattgaactgtttatctcatgtatttatgatagatacagatgttcaaattatgcgttgtttcttgccccatcttatttttgtacacttgatggagcggctgaattattcatttcctgactttgtgaatttgtgttcaacacacatactaagaggttgtgacataatagtgatcagaagtggagtactgtacttgtataccaaatgctaaagtgtatttcaaagtttaaaagtgaaacaagcatatttcctttttacttagaagacctgtgtaagtaattccaaaaacagtcaatgaggggaaatcctgtgtgcatatgtagaaatgtgtttaagctcagtgaatttaagcagcttttttggcacagttgaattgaaggaaataataagacataaatctaagacgttgttaattgtcaggttttcgtacatagagatctttgaaagaagttgttttgtgccttcttaggtaagcggaattgatagactttaaaatttctatgtgaacataaaaccattggtttaaaaagctaaaagtgcatcatttatcacttgctccccaaagtttttccaaagtcaagaataattatagaactatgagagtcaggatggcaaaatctgtcatccattctcatgggtggttagggctgagaaaaaaatgtgatccactctcatgggtggttagagctgagagatagagaggcttaatttgggtttacctattggctctgaggatccttgaccaaatttttatgaactttaatttcttagggtacccagtggagaaaggtatcaggcaacttaggacctttgagcagagctcgggactcacaaggccattgattgaccagagcaagttggaaaggttttgcaatgtgctgcttggggactttatacattaggcaacagctatacttttgggattattaacgtttatgtctgtgaagatatttaaccaggaatatgttttgttttcttttgaacagttgagccccatatgggggttggcaggcagcagagaggcccctttcaaggtgttcgggtaaagaactcagtgaaggaactcctgttgcacatccgaagtcataaacagaaggcttctggccaagctgtggatgattttaaggtgacatctatttttctgttttgagtatagagttggggagaggggttagtctgtcagggttattatgatgacctaggtccagtcatcaagtaagtcacttgaaatttttcataagatgacaaagtccataggacagagaccatatttgtctggtctgttgtatcctccttagcccagtgccagacacctggtaggtgggcaagagaaactcaatgaataaataaatgaaggcaagttcagaggctcaactgaaatggaacattttaactagaaagggaaaaatcaaatggtcttattaatttcatcttgacctgcgttgagctaaggtgaaagtgaaaatgaggaagtcgcaagatagaataaaaattgatatagaaaatcaatattgatagaaaaaccatatcagagatttatggtaagctataaagggtggtagagataagcctacttactgatgtatattaagaggaagtcattttgtatacactaaattggaaacttttttctttatagacacaaggtgtgaacatagaacagttcagaggtaagagttacttgtatttgtaattttttcagggctttggagtaaataatagagtgtaattatgggtaacatttataaaataaaatgatgacagaggctgtattcctttgggtacagaattgaagaacacagtatcatacagtgggaaaaggaaagggcccgattcgttgtctgatggacctgcttgcaaaaggccagctctgttgcattcccaatttttggtaagtatctcaccattttcctctgactatcctttggaaattattcctgggataattttagaaggaagtgagtgtgcaagttgcattttccttctttccagacaccacctcaaacaccaacgcccggggagagcatggaagatgttcatctcaatgaacccaaacaggagagcagtgctgatctgcttcagaacattatcaacattaagaatgaatgcagccccgtttccctgaacacagttcaagttagctggctgaaccccgtggtggtccctcagagctcccccgcagagcagtgtcaggacttccatggagggcaggtcttttctccacctcagaaatgccaaccattccaagtcaggggctcccaacaaatgatagaccaggcttccctgtaccagtattctccacagaaccagcatgtagagcagcagccacactacacccacaaaccaactctggaatacagtccttttcccatacctccccagtcccccgcttatgaaccaaacctctttgatggtccagaatcacagttttgcccaaaccaaagcttagtttcccttcttggtgatcaaagggaatctgagaatattgctaatcccatgcagacttcctccagtgttcagcagcaaaatgatgctcacttgcacagcttcagcatgatgcccagcagcgcctgtgaggccatggtggggcacgagatggcctctgactcttcaaacacttcactgccattctcaaacatgggaaatccaatgaacaccacacagttagggaaatcactttttcagtggcaggtggagcaggaagaaagcaaattggcaaatatttcccaagaccagtttctttcaaaggatgcagatggtgacacgtgagtattcttttatctcatgttcttaattaggtaagccacacttgttggactagtgagcatataatttttctagggtataacaaggtataccttagttagtggttggctaacgaagatgactggtgtagatagaaaccgccactcagtgatagctagtatgtcaagaaagggttttccttcaaaaaattttttggctgaacagataatctgttctaaattgataaaaatatctgtatcttcttgattaattgagtttggaagaccagcgtagactatgtctatagaacagaaacagttagatcatgattagggataaactgtgagttggtttgtagattgatgttaatctgtcctgatgtctttgtggccttgggcaagttatttaacctccttaggtctcagttccttgacgtgtaaaatgataatacctcttgtataggggttttatgagtattaaaaataatagatttaagttgatcagtatggtgcttgacattcttctttttcttatttctgatagcctaacccatcctgttccaactggggtgtattatcaatgtagcagaaaagacaaattatgctttgtaatgtttcatttgagtgtaccaatatataaaaagggggctaaaggaagatttttttttttttttcaaaagaacaacttagtgaaatcagaagtgattcacccgctttcctttccatgttccccaggttccttcatattgctgttgcccaagggagaagggcactttcctatgttcttgcaagaaagatgaatgcacttcacatgctggatattaaagagcacaatggacaggtgaggaccttgacagagtctgaaatggcaaagagggggtcatggtgaagtgaatgatgaccagccttatgtgtagatcatcttagagctcaagatcaagagagtttagttaatattaactttgagatgttgactttttgctaccatcaaccttgaagttattaatgttaactttgtagctgtttgaccaaacactgagagtaataaagccacaccctaggcttactttagtttccttgtcttacagtatctgattgcttattcaaaggatttattttctctctgtgggtttttccctcagtcatagtttagtttcatattccttgttatgataacattgtatgtttaaaatatcttttttcctctggatatccacagagtgcctttcaggtggcagtggctgccaatcagcatctcattgtgcaggatctggtgaacatcggggcacaggtgaacaccacagactgctggggaagaacacctctgcatgtgtgtgctgagaagggccactcccaggtgcttcaggtaagaggcagcaaaccaggcttccatcattgcaaggccagagagatagagttggatattagaagtcggatataggttgcctgttgcaatgatctattttgagttaacttattcatttcttggggattctaataggtatatgcgcagcttatgtagctaacagatgtctgtttttaaaatctgcaggcgattcagaagggagcagtgggaagtaatcagtttgtggatcttgaggcaactaactatgatggtaagcaactgaaactttattagattcagagccacttagggggaaccataaggtctaagggtgctaagtatactaagaaggaaggtaattaaagctaaaatattctgtaggtaaaattagacccaaaaagagacaatattcagattgccttactagttcttgtggagcccatttataggttaagttagaggccatcctcagcatttgtcattatagaaggaccaaaagacctgatgggatgcttgaccactgcttgattatacttttcttctaggcctgactccccttcactgtgcagtcatagcccacaatgctgtggtccatgaactccagagaaatcaacagcctcattcacctgaagttcaggagcttttactgaagaataagagtctggttgataccattaagtgcctaattcaaatgggagcagcggtggaagcgaaggtaaattcacagaaaaggtttaagatggggtaggggagaaactggttatatagcaaaagaccttgcttccaagtacagattcaaacttctttcttttttttctgaaattaatggtgtgagtagcaatgtatgggtggttaagaagcccagaattttttttttttttgagacagagtctcactgtgtcgcccaggctggaatgcagtggtgcgatcttggctcactgcaacctccgactccctggttcaagcgattctcctgcctcagcctgcccagtagctgggactacaggtgcctaccaccacacccagctaattttttgtatttttagtagagacggggtttcaccatgttagccaggatggtctcgatctcctgacctcgtgatctgcccgcctcggcctcccgaagtgctgggattacaggcgtgagccaccgcgcccggccaagaagcccagattttaacagatcatttcatgtgttttcttgatttgctttaaatccatgaattattatccaaaaggtcatttaggtataaaataaatagtctttgaaaggtaaagaaaatgcttgaaattgatattgtcattttggcttccattttcatacactgagaataaaggtagtgctttttgtaaggatttcttcattgttgtaggatgtggaattcatcttctggtttttaagctggaaaatagtttattcttttaaaattttggttttattcactgagtatatgggggaaaaatgcctaagtcataaaccatttggacccttgaggcttactgactagtaaaataggtgagagatatagctaaatataactctacagggaggctaccaaatctggaaatgtaggtgaatacataataaatggtttactgataggttatgacataggatttaaaaatatttatttttctacattttatggccaccctgtataaaaaggtacattgtgacaagaggcatatagacaaattaataggaaatttaagaggaataaaagattccatttagcttgggattaagcaaggcattttggagaagggagcattcaaagtgagtctctgaagctgaatcagacattcaggagactgggtgaaaagtgtattctgaggcatagtatctggatttttttttttttttttcctccctcttgcctttgacaaggatcgcaaaagtggccgcacagccctgcatttggcagctgaagaagcaaatctggaactcattcgcctctttttggagctgcccagttgcctgtcttttgtgaatgcaaaggtacaccagagttggaatggccttctgtacaccctctcaaagtttttgagctcctttcatgaaatttcccccttcctgatgtctgataattcatttctttgtcttcaggcttacaatggcaacactgccctccatgttgctgccagcttgcagtatcggttgacacaattagatgctgtccgcctgttgatgaggaagggagcagacccaagtactcggaacttggagaacgaacagccagtgcatttggttcccgatggccctgtgggagaacaggtgagaggcacaggagggagaggaagtattttttggcactgcagtctgaaacagaaagggagatgaggctgtgcagggcgaaggccagctgttgctcttctggtggactctatcagtgtctgtgtctcacggtagctgtcatagcattgtggagttactcttcgtttggaaacagcaattaagaaatttgagggattatccatagactcaaaatggttagaggtcaggtagtattctgtgacacacacttagggttagagtaagtcagaatggtttaaggttcggaaagagaagataccaaggttcctgcagataccaaggaaagagaatcttagtcttgtaatgtatgagccttcaaatattgtggatattaaatgagttgttacatgtggagtgctcacaatagtcccgggtacagagtaagagatcagtgaacatcaatagttagaattatttctatctatgaagtgatactgaacaaaaaatggaaaaattacttatgtaatttcaaacctagaaatattttgttttaaacagcatatttaatgctttactcatcaaatatggttatatattatcattgagtattgaatagtttcatgagtaaactttttagataacaagaacttattctttcaagaacttaaaatgtttttgatggaactcttttcctgggaggaatgagggggattgtggctgtgggtaggtcattacatactttactaatcacaaaataaaatacgtggaatgcagtttagctttttctttgattctgagctgtcattatgaccataatgttatagtagcccctatttatagagctctttgtaatttagaaagaatatttctatagtttgtaaaaagttttcatgtatatcatttaatagttagaagaactttacaagtttcaagtttcaactgagaaaattgatattcagagaggttccaaggaccagaaccatcattaacttgtaaaaggcagagtcctaagcccagtatttgcttctacttcactgtttgtggtgtgcagtcatataactatgctctcagggatcattgagatattaagccatttaactcttcattaaatgttcccagattatctcctttttgctttggtattttgtgtgtgttgggcaggtagaggctcttttccctggcttttattgtcatactgtggtcgtgtgtttccttctagcagctatcagttgtatcccctaccccaatcgcctttcatctaaattgttgcttctaatctgctggaggctgagagatagaaaataaaatttgtcagactgggatgtaaaatgaatcactctgaatgagccgggatcttttctgtgatccatgaagttacgtgtagatgctttaatacttggatatcatgacagctgttttgacttgaatggtattaaggatttacttgtgtgtgtatcataaaatgtgggttttctgttcctgttagttgaggctgacttcaagataagtgagatattataatatgccttaattactgtcttatgttaaatgttctcacaaatagcaagagtaaagattaggaaaagaatataggtgttaagtttatggagattttcaacttcagataatttttagtggagatgttttactttcttgaactcaaagattattataagagatctgaaataagtttaaaaggagtttagtatttttaaaagtcacctcaaaatcttgagaaatattgtgtgtatttcttcgtatacttacaagttaataggagtagtgtagatggtataagaaaggaatgaaactcagaaggaaatacaccacattggccataagaaataaacctcacaaattttatttgtttctcttccagatccgacgtatcctgaagggaaagtccattcagcagagagctccaccgtattagctccattagcttggagcctggctagcaacactcactgtcagttaggcagtcctgatgtatctgtacatagaccatttgccttatattggcaaatgtaagttgtttctatgaaacaaacatatttagttcactattatatagtgggttatattaaaagaaaagaagaaaaatatctaatttctcttggcagatttgcatatttcatacccaggtatctgggatctagacatctgaatttgatctcaatggtaacattgccttcaattaacagtagcttttgagtaggaaaggactttgatttgtggcacaaaacattattaatatagctattgacagtttcaaagcaggtaaattgtaaatgtttctttaagaaaaagcatgtgaaaggaaaaaggtaaatacagcattgaggcttcatttggccttagtccctgggagttactggcgttggacaggcttcagtcattggactagatgaaaggtgtccatggttagaatttgatctttgcaaactgtatataattgttatttttgtccttaaaaatattgtacatacttggttgttaacatggtcatatttgaaatgtataagtccataaaatagaaaagaacaagtgaattgttgctatttaaaaaaattttacaattcttactaaggagtttttattgtgtaatcactaagtctttgtagataaagcagatggggagttacggagttgttcctttactggctgaaagatatattcgaattgtaaagatgctttttctcatgcattgaaattatacattatttgtagggaattgcatgcttttttttttttttctcccgagacagggtcttgctctggcgcccaggctggagtacagtggcatgatcttggctcacttcagccttgacttgggctcaagtgatcctcctacctgagccttctgagtaactgggactacaggtgtgcactcctcgcctggctaattttttattttttgtacaggcaggatcttgccaccttgcccaggctggtcttgaactcctgagctcatgccatctgcctgccttagtctcccaaaatgctgggattacaggagtgagccaccatgcccggctggcagttgcatggaagagaacacctctttatggcttaccctctagaatttctaatttatgtgttctgttgaaatttttgtttttttacctttattgaaacaacaaaaagtcagtattgaaacatatcttcctgttttctgttgtcaaatgatgataatgtgccatgatgttttatatatatcattcagaaaaagttttattttttaataacattctattaacattattttgcttgccgctggcatgcctgaggaatgtatttggctttgattacacactaagtttttgtaataaatttgactcattaaaaaccttttttttttaaaaaaaaaaaaaaagaaaatctcattagtgaacttatctttgcagctgagtacttaaattctttttaaaaagataccctttggattgatcacattgtttgacccagtatgtcttgtagacacgttagttataatcaccttgtatctctaaatatggtgtgatatgaaccagtccattcacattggaaaaactgatggttttaaataaactaattcactaatattatttgtcttacatgcattttcttttcctagtgccttatttccctagatagaaaaagtactattgatgattttaaatacctttgagttagttaatttatgttaatttgggttttttggagaacatgtttcctgaaagtatacaagatttaacatcaaaatctatttgctaagtttactaggagaagtctgttaggttttgaaattatcatggaagtttaatagatgctgtcgatcattcacatgtttagatgcttaaaaaaaaaaaaaaaagctaagtgggagcagtgaatcataggaataacagtttggagattaccaggatcatccttagagagatgtaaacctgggaaaggttcttccctttgccagcaagccattttgacgtgtgagaacaaacacatcaatatctgtcagtatgttgttacaattattgcacatatattctagttcttacagctgttttgagaatctggtgaaagctatgaatcctttccctggaaaatgcaaatatatgtatacacacaaatgctgtgtgcaatatttggggcttcacaacctttagaagaccatgactcacaagaatccactttagtttcatttctgcacatacttttcttctttcgtataacaaaatcttgggtaatttgctttgcaaatgcaacttgttaaccagaacagcagaaatgatgtactcccactgaacatagccctacagtgagctttacccaagtgagcttctatgttctctcttaatcccaaattctctcatagttgaaccagtatctagcaagtatgtttgtgtgtgcgtgtgtgtgtgtgcaaagatgtaaataatttgaggctaagacatataagacatttcttagccttaagatgtttacgtgagagacatggcatgtactttattaggtaaactatgttaaatagcatttaaaaagagattcagaagggacatttctttctgactggggaggattcaaggtagagcatttgaactgtatcttctgaatagttgatttggatgttcatataaagggaggagaggcagatgaaagaaacaaacagcatgaaccaaagcataggcgtctgtgggaatagcaggtgattttaatatagttagttagactctggaagtggccaataaggttcatcttgtgttccacctctgactggtaatatttttgagtatcaagttgagaaagatcctcaggctcgtaggggcttcaggagaaggttgctggattgaaccttcaggagaggttgctgtgattggtgcgtgatatctgccacaggaatatgggaaatggctcttgattgaatacatcttaaagcctcacagaagccaagactgtgtgctcattgctgcaacttcagtgcctagcacagtgcctggcacatggaaatagttcataaaatattggttgaatgaacgaatatatgccaatcctggttagagtcactggttttgttgggggaggtgatgttttgagccagagttatactattaattactaatgaattattggctatcatggttctgaatttaattctgccacatgatttcacagtgacatggatgatatgttaatgaaaatgggcatgggcatagttggactcattaaggaaaaaaatcaggcagtctgtctttgcaaaggactgttagtgctgtagtttgatattgactaaggaatccctacaagagtcagagaccaaatcttccagctcaatttgttagtcaaatcagtaacatttaatatcctttctatatttttacttaatcaggacaggaaaatttcctcaaatgtctctgacttttaacaaatgtcaacttaaacatacgaccactaacttccattttctgataacctcagttgttctgtattgaatacgacctcagagagaaatcagcttcagtcactggctaagtttgtgatggttcctctgagatcaggcctgggtacaaggtttgagattacttgtaaccatgctactaggttttggctatacctgctggtgccctggattaatccttgagagaaggggagacactgccttattagtcatcagaggccctgcacctagcacagtatctgacacattgtagacattcaataaatagttcctaagttgaatttaatttcaacactttgtaaaaattttttttcttggcatattttattcttcagtgtataaatatttttattatctacatacagtttatgacttaatccagtacttttatgcttcaagcctttggagtctgtgcagacccagaaacattgcatgggtggcacatttctaggaggggtaagattggttgtttttgtttgtgtgtgtgtttgttttttttgagacggagtctcgctctgtcgcccaggctggagtcagtggcaagatcttggcccactgcggcctccacctcccaggttcaagcaattcttgtgcctcagcctcctgagtagctgaaattacaggcacgcaccaccacacctggctaatgtttttgtatttttaatagagatggggtttcaccatgttggccaggctggtctcgaacttctggtctcaactgatctgcccacctcagcctcccaaagtgctgggattacaggcatgagccatcacgcccagctgattgtagattcctctcaaaatgtgtcttgctttttcctttgtactccttgtcctctggcctgttgtccctgctctctccatcacaccattccccttgcctgtcagctcaagagggtttgggggtgagatagtgcagctgctgagtgccctaggttcaaagtttcagtctttggtcgacattagtatcttatgtgaagcttgttaaacatgcaaatacttaggccccaccccaggtttcctgaatcagaatctccaggattttcagggcttctggcagattatatgtggtgattctaatgcagttttagtctaaattaattaggaaatgcagactttggagagtagctgtggttgggcagtagccatatggtggtaacagaatgggtttctggaatgcgtatggggatgaagtggcaactgatgaagatgtgcagtgtgccaggcacgttggatcctatggtatagaaactagctttgaagatacaatcatgagtcaccttatttttttttcctgctttcagaaatcacttttctaaggtgattctggtgtttaagtttctcaagtatattagtttcctaggactgtctaacaaataaccacaaacttcgtggcttaactcggagaaattcattttgtcatagttctggaggccagaattctgaaaccaaggtgttggcagaaccatgtgccctccaaaggctctaggtggaattcatgccttctattccagcttctagtgactccaggtgttccctgccttgtggcaatataactccagtgtctgctccatctccacatggccttctcctccctgtgcctcctctctgtatatctcttacaaggactcttaccactgaatttaggggccacctgagtaatccaggatgacctcatctcaattttatttatttatttatttttgagggggagtgtgcaatggtgccatcttggctcactacaacctccacctcctggattcaagtagcctcccgagtagctgggattacaggcatgcaccaccacacctggctaattttgtatttttaatagggacggggtttcaccatgttggtcaggctggtctcgaactcctggcctcagattatccgcccactttggcctcccaaagtgctgggattacaggtgtaagccacggcacccgacctttttttttttttttttttgagacggagtctaactctgtcaccgaggctggagtacagtggcacgatctcagttcactgcaacctctgcctcccaggttcaagcaatcctcctgcctcagcctcccaagttgctgggattacaagcgtgctccaccatgtccagctaatttttgtatttttagtaaagacgaggtttcatcattttggccatgacggtctcgaactcctgacctcaagtgatctgtctgcctcggcctcccaaagttctgggattataggcatgagccaccacgcccggcctcagtattctaaattgtacaaagactttttttccaaatgaggtcacattcacaggttctgaggattaggatgtggacatatctttgggcagccttaacttaaaacttactacaccaggaaagaggatttataataatttctgttatcattatttctcttaaaaaatgagtaagattaatatttccttttttaaaaaatcattttatcatggtaagaacattctattttcttacgaaattgtaaagtgtacaataatagggacaatgttgtacaatagatctctagaacttatgaatatttctttctgagcaatcctatagcctgtcttcagaatctatggtatcttttacatattattattgatctaatgtatggtaaaatatctctatttcatttattagctataatactaaacattgaccaggcaactcatttaccattgataaactttaagagaaacaaaaatatttattgagctgtaactaaaaaattatgataatgattaaaagagctttaagtatcctaaacttccaacaaagcttttataattgtctcttgtcattttgctccctggtacacatgtgaatgaatctgctgctcttcaccttggatcacactacctagagctgtgtgagaagcaacatgatcccaaatcaaattaaaatcctatgctttacggcatctgatcttggaatgataacagtagaggagttagtcactgaaaactgcaaatgtttaaaagtcaagggtcaaatccagtttcatacaataacaattgattccactttgctaaaactcaattgaaatagactgttttaactctagatattatctttttaagtgataggattctggcttttgctccagaaataaagatttcagcagctctgggaacttggtagttggatccagcatgtgtttacctgttggatcagcatagttcctgtaggcttgacaatcgggacaaatttcagattgtgaaacaacactagattccttagcttaattgatctggggtttaagtttcaaattactatttatttttattaactcaattcatggtatcttaattcacatggcctgctctccctatttgcagccaaacatctctcaggtagtactttaatttcaagtgattgtgtaagactgtagggtacttcctgattggccttcgtggaagccccaggtgtcgactggtctggaggcgaactgctattttcttccagcactctagggttagttttggtgtttgcctcagtgggagtgtgtccagtgagagtctgcttttctgaattggtgccagaggtgttttttttttttacattagatatcatttttcttttgtctttaaaaaaggtatccttttctttttgctcccaagaagtattccttccagaatattttaaaattttcaaaaaattctcctttttaggctctcacagatatggaagaattggtcgtcttcaggatagcaattttgtctggtgtaacttcttacaccaggaaattcaaaatatatcatttgggatatatttgaatatatcccaatatatattttgaaaaatatatcaaaggaaaattcaaaatatatcatttgggaaaacaagtaagcatttggatggtgcctctactcaaaatattcctggaaaatttttttaaagataaatttttagccaggtgtggtggcacatgcctgtagtgtctgctacttggaggctgaggtgggaggactgtttgggcctccagtgttccgggctgcagtgagccatccatgatcctgccaatgtggtgtaataagaagatgtatagacagaagtttaatttacacaggttattaatttctatacacattctaatcatacaggctaatgaggtacgtcatttaaagtgcaggatttatagacagctgacaagtttttcttttatgacattattctatttccctatctatataaatcaatcagttttgtttcttccctcagctaaagttatatcaaatttgttatcaaggtcaaaatgtctattaatcagttaatagggtagctaaaaaaagtctgttaattttttttttttctattttctccgccaccacccacatctaggttttcaaggctttattcttggattaccacaatagacaggaacctgactttttattatggaaacattcaaacacacatacaagtaggcagaatagtatattgaacacatacatctatcatgaaacttcatcaattataaacattttgccatttttgtttcctcttgcccccatattttgttctagaataagttaaagcccactccaagcattatagattgtcagtaagagtcgctaacagataagtaacttgtgtccccagtaaatagctttctaattattcttcctccaatcttcctgcttttcttaccaatctcaaaatttccactacttggcatactgttaaagaaacagagaaagtttttcaaaggctcaatgctgcctgttgaatcagatgcaaactcttgtcctggtttacaaagctatgttgaccttagcttgaccctgcctgtctaatctcatctcatttttccccagtgggctatcaggtgggtctcttcactgtatcagctgatgctctgtttattcctgtctcttgtcatgtcctcacctccccaaattctgtgcatcctagaaagccctgcttgggtgccactttctctattaagctttttccagctcttactgactgctcctttccctgaactcctgggattaaaacacaattcctctaactttcatatctggtattttctgtcatattccagacttaattattgcaatcaggaaagtgagctctgaatctgaattttctcttccttgcttccttttttcctttcttccaacccttctctctcctctctccttccttccttccttctctttctttcctttctttctgctcccctgtccccctccccctccccttcttccctccctctcccctcccctctctttgtcacactctatcatccaggctggagtgcagtgcatgatcatagctcactgcagctttgacctcccggggtcaagtgattctccctcctcagcctcctgagtagctgggactacaggtgcacactaccatgcccggctaatttattcttgttgtaaagatgggggtctcactatattgcccaggccagactcctggcctcaaccaatgctcccttttcagcctcccaaagtgctgagattacaggtgtgtgccactgcagcatttactttttaaatacaactttaaaatgtctgggtgagtggtatttttgaggacacgaagaaggtgagtggtgctggatagaatctagcattggaatcgtaggcagaattctaagatggtcctagggctatctttgcctcagatgttactcctgtgattctgttaggttacattgcaaaagtgattttgcaaaggtaaataaagtaattattaaccagctgaccttaagatagggaaactactcatctaatcacacgggccctttaaaagcggagtgttttctttggctggaggcagaagaggaaatcttagagattccaagcctgagaaggactcaacccgcaattactggctttgaggatggagcaagggggcaatgagccaaggaatacaggtattttgtaaatatccaaacagaaaatggaatctcaggcctacatccacagggaattgacttctgccaacaacctgattaagcttagaagcagattcttgctcagagcctccagataagagcccagccctgctgacaccttgagtttggcgttgtgttacttcatgcagagtcaagccaaccccgcccagactctgacctgctgaactgtgagataacacatgggtggtgttctgagctgctaaatttaggggtaatttgttacacagcaatagaaagttaatacaatatataacacagggtttgagcttatagtgcaattttatgcatttcctgctattttaattaaggctccaaatcagcaagagaggttttccaataaatgggggcactggtcttaggatgtgtggtcattacacaggctagcagtgtctttagtttatgatatctcacttttgtccagcacttccccattccagatgggaaaatttctttttttctttttctttttttttttttttttgagacggcgtctcgccctgtcactcaggctggagtgcagtgacatgatcgcggctcactgcaacctccacatcctgggttcaagcaattcttctgcctcagcctccctagtagccggaaccacacgtgcatgccaccatgcccggctaatttttgtagtttttagtagagatggtgtttcatcaagttggccaggctgatcttgaactcctgacctcgtgatccacctgccttggcctcccaaagtgctgggattacaggcatgagccaccgtgcccggcctggaaaatttcaaggaaaggaaagtgtagcttccctattgccagtgttttcaaaagaatctataaaagggtcctggagcaggagaaggtgattaggacagcatatctgaccagtagtagcatcagcttactgtgttgccagactctagccatttacctctactgtgagaggggggcatattttgtagggcagcggtctccaacctttttggcccagggaccagtttcatggaagacagtttttccatggatgggctgtgggtgggtggatgatttcaggatgaaactgttccacctcagatcatcaggcattagattcacataaggaggacacaacctagattccttgcatgcacagttcacaatagggttcacggttctgtgagaatctaatgccagaggctgatctgacaggaggcagaggtcaggcggtaatgctggctcgcccatcgctggtaccggttcatggcgctggagttggggaaccctgctgtagggaaagaaccccttagctctgcagcagccacgatttcagatggtacaacttgtttaaaataaatagacacactcacttcagagactggtcaagaaatagttgccgagagctcttggaaccaagatgagaacttacattacagtttcttctgcagcctaggatcacagatgacgggcaggggctttattagtttaaccggcatctatttctccagtcgtgcacacagaaatgaatgaatgattagacattcatttggggtgcctttgtgtgattcataaataacttgttccttataaaatttattgctgaatgactcattaaagaattatgatgaagataataaggctcctaatttaaagggttatgcaagtgttcttttaaaaatcaactttgcgaggtgtaattaatgcataaattttaagtgtacagtttaacaaatgtatacacctatgtaaccaccacccagtcaagatacagaacatttttgacatcccagaaatttccttcatgcccctttgcagtcaatctctccttccacacagctattgatctgatttctattatattattgtagattagtttttgcctcttcaaaaacgtcgtataaatagaatcatacagtctgtactattttcttattttctgggtttctttcactcagcatgatttttttttttttttttttttttgagacggagtctcgctctgtcgcccaggctggagttcagtggcgcgatctcggctcacagcaagctccgcgtcccgggttcacgccatttttctgcctcagcctcccgagtagctgggactgcaggcgccggccaccatgcctgcctaatttttttttttttttgtatttttagtagagacgggtttcaccctgttagctaggatggtctctatctcctgacctcgtgatccacctgccttggcctcccaaagtgctgggattacaggcatgagctaccgcgcccggcctctgcatgatatttttgagattaatccacattggtgcattgatcactaaagtatatttctattgctgagtagaattccattgcactaataacacaatttgttaaccattcacatattagtgggcatttcgattgtttccagtttgggactattattgaataaagttgatatgaacagtatttgtgtggacatatgttctcatttaattttaaattcttaggagtgaagtacctggttcatataag

SEQ ID NO: 1720 - DNA, 4135 bp, Homo sapiens
gagccggtggcgcaggtgtcggggtcctcgagcgcccagcctgggagcatgattgtggacaagctgctggacgacagccgcggcggagaggggctgcgggacgcggcgggcggctgcggcctcatgaccagcccgctcaacctgagctacttctacggcgcgtcgccgcccgccgccgccccgggcgcctgcgacgccagctgctcggtcttgggcccctcggcgcccggctcgcccggctccgactcctccgacttctcctctgcctcgtcggtgtcctcctgcggcgccgtggagtcccggtcgagaggcggcgcccgcgccgagcgccagccagttgagccccatatgggggttggcaggcagcagagaggcccctttcaaggtgttcgggtaaagaactcagtgaaggaactcctgttgcacatccgaagtcataaacagaaggcttctggccaagctgtggatgattttaagacacaaggtgtgaacatagaacagttcagagaattgaagaacacagtatcatacagtgggaaaaggaaagggcccgattcgttgtctgatggacctgcttgcaaaaggccagctctgttgcattcccaatttttgacaccacctcaaacaccaacgcccggggagagcatggaagatgttcatctcaatgaacccaaacaggagagcagtgctgatctgcttcagaacattatcaacattaagaatgaatgcagccccgtttccctgaacacagttcaagttagctggctgaaccccgtggtggtccctcagagctcccccgcagagcagtgtcaggacttccatggagggcaggtcttttctccacctcagaaatgccaaccattccaagtcaggggctcccaacaaatgatagaccaggcttccctgtaccagtattctccacagaaccagcatgtagagcagcagccacactacacccacaaaccaactctggaatacagtccttttcccatacctccccagtcccccgcttatgaaccaaacctctttgatggtccagaatcacagttttgcccaaaccaaagcttagtttcccttcttggtgatcaaagggaatctgagaatattgctaatcccatgcagacttcctccagtgttcagcagcaaaatgatgctcacttgcacagcttcagcatgatgcccagcagcgcctgtgaggccatggtggggcacgagatggcctctgactcttcaaacacttcactgccattctcaaacatgggaaatccaatgaacaccacacagttagggaaatcactttttcagtggcaggtggagcaggaagaaagcaaattggcaaatatttcccaagaccagtttctttcaaaggatgcagatggtgacacgttccttcatattgctgttgcccaagggagaagggcactttcctatgttcttgcaagaaagatgaatgcacttcacatgctggatattaaagagcacaatggacagagtgcctttcaggtggcagtggctgccaatcagcatctcattgtgcaggatctggtgaacatcggggcacaggtgaacaccacagactgctggggaagaacacctctgcatgtgtgtgctgagaagggccactcccaggtgcttcaggcgattcagaagggagcagtgggaagtaatcagtttgtggatcttgaggcaactaactatgatggcctgactccccttcactgtgcagtcatagcccacaatgctgtggtccatgaactccagagaaatcaacagcctcattcacctgaagttcaggagcttttactgaagaataagagtctggttgataccattaagtgcctaattcaaatgggagcagcggtggaagcgaaggatcgcaaaagtggccgcacagccctgcatttggcagctgaagaagcaaatctggaactcattcgcctctttttggagctgcccagttgcctgtcttttgtgaatgcaaaggcttacaatggcaacactgccctccatgttgctgccagcttgcagtatcggttgacacaattagatgctgtccgcctgttgatgaggaagggagcagacccaagtactcggaacttggagaacgaacagccagtgcatttggttcccgatggccctgtgggagaacagatccgacgtatcctgaagggaaagtccattcagcagagagctccaccgtattagctccattagcttggagcctggctagcaacactcactgtcagttaggcagtcctgatgtatctgtacatagaccatttgccttatattggcaaatgtaagttgtttctatgaaacaaacatatttagttcactattatatagtgggttatattaaaagaaaagaagaaaaatatctaatttctcttggcagatttgcatatttcatacccaggtatctgggatctagacatctgaatttgatctcaatggtaacattgccttcaattaacagtagcttttgagtaggaaaggactttgatttgtggcacaaaacattattaatatagctattgacagtttcaaagcaggtaaattgtaaatgtttctttaagaaaaagcatgtgaaaggaaaaaggtaaatacagcattgaggcttcatttggccttagtccctgggagttactggcgttggacaggcttcagtcattggactagatgaaaggtgtccatggttagaatttgatctttgcaaactgtatataattgttatttttgtccttaaaaatattgtacatacttggttgttaacatggtcatatttgaaatgtataagtccataaaatagaaaagaacaagtgaattgttgctatttaaaaaaattttacaattcttactaaggagtttttattgtgtaatcactaagtctttgtagataaagcagatggggagttacggagttgttcctttactggctgaaagatatattcgaattgtaaagatgctttttctcatgcattgaaattatacattatttgtagggaattgcatgcttttttttttttttctcccgagacagggtcttgctctggcgcccaggctggagtacagtggcatgatcttggctcacttcagccttgacttgggctcaagtgatcctcctacctgagccttctgagtaactgggactacaggtgtgcactcctcgcctggctaattttttattttttgtacaggcaggatcttgccaccttgcccaggctggtcttgaactcctgagctcatgccatctgcctgccttagtctcccaaaatgctgggattacaggagtgagccaccatgcccggctggcagttgcatggaagagaacacctctttatggcttaccctctagaatttctaatttatgtgttctgttgaaatttttgtttttttacctttattgaaacaacaaaaagtcagtattgaaacatatcttcctgttttctgttgtcaaatgatgataatgtgccatgatgttttatatatatcattcagaaaaagttttattttttaataacattctattaacattattttgcttgccgctggcatgcctgaggaatgtatttggctttgattacacactaagtttttgtaataaatttgactcattaaaaaccttttttttttaaaaaaaaaaaaaaagaaaatctcattagtgaacttatctttgcagctgagtacttaaattctttttaaaaagataccctttggattgatcacattgtttgacccagtatgtcttgtagacacgttagttataatcaccttgtatctctaaatatggtgtgatatgaaccagtccattcacattggaaaaactgatggttttaaataaactaattcactaatattatttgtcttacatgcattttcttttcctagtgccttatttccctagatagaaaaagtactattgatgattttaaatacctttgagttagttaatttatgttaatttgggttttttggagaacatgtttcctgaaagtatacaagatttaacatcaaaatctatttgctaagtttactaggagaagtctgttaggttttgaaattatcatggaagtttaatagatgctgtcgatcattcacatgtttagatgcttaaaaaaaaaaaaaaaagctaagt

SEQ ID NO: 1721 - protein, 716 aa, Homo sapiens
MIVDKLLDDSRGGEGLRDAAGGCGLMTSPLNLSYFYGDPAAAPGACDASCSVLGPSAPGSPGSDSSDFSSASSVSSCGAVESRSRGGARAERQPVEPHMGVGRQQRGPFQGVRVKNSVKELLLHIRSHKQKASGQAVDDFKTQGVNIEQFRELKNTVSYSGKRKGPDSLSDGPACKRPALLHSQFLTPPQTPTPGESMEDVHLNEPKQESSADLLQNIINIKNECSPVSLNTVQVSWLNPVVVPQSSPAEQCQDFHGGQVFSPPQKCQPFQVRGSQQMIDQASLYQYSPQNQHVEQQPHYTHKPTLEYSPFPIPPQSPAYEPNLFDGPESQFCPNQSLVSLLGDQRESENIANPMQTSSSVQQQNDAHLHSFSMMPSSACEAMVGHEMASDSSNTSLPFSNMGNPMNTTQLGKSLFQWQVEQEESKLANISQDQFLSKDADGDTFLHIAVAQGRRALSYVLARKMNALHMLDIKEHNGQSAFQVAVAANQHLIVQDLVNIGAQVNTTDCWGRTPLHVCAEKGHSQVLQAIQKGAVGSNQFVDLEATNYDGLTPLHCAVIAHNAVVHELQRNQQPHSPEVQELLLKNKSLVDTIKCLIQMGAAVEAKDRKSGRTALHLAAEEANLELIRLFLELPSCLSFVNAKAYNGNTALHVAASLQYRLTQLDAVRLLMRKGADPSTRNLENEQPVHLVPDGPVGEQIRRILKGKSIQQRAPPY

SEQ ID NO: 1722 - DNA, 4065 bp, Homo sapiens
  misc_feature (1)...(4065): n = a, g ,c or t
humancdngsunchrusdnggcgagttcttagagaaaaaggctgcttagctgctgcttatcatgtaacctcaaaaggaaactgatcgtctttctcatgctgtcacgtacttgggttattatcgctgattacagctggaaacaattgatttgctcttacgtatttgtgtgacttgactcttcaaacacaaaggttaacaggaagatctcgagggccctggctgaacttcaccttttggctttcttggcctgatgctgaactctcgaggttgagccccatatgggggttggcaggcagcagagaggcccctttcaaggtgttcgggtaaagaactcagtgaaggaactcctgttgcacatccgaagtcataaacagaaggcttctggccaagctgtggatgattttaagacacaaggtgtgaacatagaacagttcagagaattgaagaacacagtatcatacagtgggaaaaggaaagggcccgattcgttgtctgatggacctgcttgcaaaaggccagctctgttgcattcccaatttttgacaccacctcaaacaccaacgcccggggagagcatggaagatgttcatctcaatgaacccaaacaggagagcagtgctgatctgcttcagaacattatcaacattaagaatgaatgcagccccgtttccctgaacacagttcaagttagctggctgaaccccgtggtggtccctcagagctcccccgcagagcagtgtcaggacttccatggagggcaggtcttttctccacctcagaaatgccaaccattccaagtcaggggctcccaacaaatgatagaccaggcttccctgtaccagtattctccacagaaccagcatgtagagcagcagccacactacacccacaaaccaactctggaatacagtccttttcccatacctccccagtcccccgcttatgaaccaaacctctttgatggtccagaatcacagttttgcccaaaccaaagcttagtttcccttcttggtgatcaaagggaatctgagaatattgctaatcccatgcagacttcctccagtgttcagcagcaaaatgatgctcacttgcacagcttcagcatgatgcccagcagcgcctgtgaggccatggtggggcacgagatggcctctgactcttcaaacacttcactgccattctcaaacatgggaaatccaatgaacaccacacagttagggaaatcactttttcagtggcaggtggagcaggaagaaagcaaattggcaaatatttcccaagaccagtttctttcaaaggatgcagatggtgacacgttccttcatattgctgttgcccaagggagaagggcactttcctatgttcttgcaagaaagatgaatgcacttcacatgctggatattaaagagcacaatggacagagtgcctttcaggtggcagtggctgccaatcagcatctcattgtgcaggatctggtgaacatcggggcacaggtgaacaccacagactgctggggaagaacacctctgcatgtgtgtgctgagaagggccactcccaggtgcttcaggcgattcagaagggagcagtgggaagtaatcagtttgtggatcttgaggcaactaactatgatggcctgactccccttcactgtgcagtcatagcccacaatgctgtggtccatgaactccagagaaatcaacagcctcattcacctgaagttcaggagcttttactgaagaataagagtctggttgataccattaagtgcctaattcaaatgggagcagcggtggaagcgaaggatcgcaaaagtggccgcacagccctgcatttggcagctgaagaagcaaatctggaactcattcgcctctttttggagctgcccagttgcctgtcttttgtgaatgcaaaggcttacaatggcaacactgccctccatgttgctgccagcttgcagtatcggttgacacaattagatgctgtccgcctgttgatgaggaagggagcagacccaagtactcggaacttggagaacgaacagccagtgcatttggttcccgatggccctgtgggagaacagatccgacgtatcctgaagggaaagtccattcagcagagagctccaccgtattagctccattagcttggagcctggctagcaacactcactgtcagttaggcagtcctgatgtatctgtacatagaccatttgccttatattggcaaatgtaagttgtttctatgaaacaaacatatttagttcactattatatagtgggttatattaaaagaaaagaagaaaaatatctaatttctcttggcagatttgcatatttcatacccaggtatctgggatctagacatctgaatttgatctcaatggtaacattgccttcaattaacagtagcttttgagtaggaaaggactttgatttgtggcacaaaacattattaatatagctattgacagtttcaaagcaggtaaattgtaaatgtttctttaagaaaaagcatgtgaaaggaaaaaggtaaatacagcattgaggcttcatttggccttagtccctgggagttactggcgttggacaggcttcagtcattggactagatgaaaggtgtccatggttagaatttgatctttgcaaactgtatataattgttatttttgtccttaaaaatattgtacatacttggttgttaacatggtcatatttgaaatgtataagtccataaaatagaaaagaacaagtgaattgttgctatttaaaaaaattttacaattcttactaaggagtttttattgtgtaatcactaagtctttgtagataaagcagatggggagttacggagttgttcctttactggctgaaagatatattcgaattgtaaagatgctttttctcatgcattgaaattatacattatttgtagggaattgcatgcttttttttttttttctcccgagacagggtcttgctctggcgcccaggctggagtacagtggcatgatcttggctcacttcagccttgacttgggctcaagtgatcctcctacctgagccttctgagtaactgggactacaggtgtgcactcctcgcctggctaattttttattttttgtacaggcaggatcttgccaccttgcccaggctggtcttgaactcctgagctcatgccatctgcctgccttagtctcccaaaatgctgggattacaggagtgagccaccatgcccggctggcagttgcatggaagagaacacctctttatggcttaccctctagaatttctaatttatgtgttctgttgaaatttttgtttttttacctttattgaaacaacaaaaagtcagtattgaaacatatcttcctgttttctgttgtcaaatgatgataatgtgccatgatgttttatatatatcattcagaaaaagttttattttttaataacattctattaacattattttgcttgccgctggcatgcctgaggaatgtatttggctttgattacacactaagtttttgtaataaatttgactcattaaaaaccttttttttttaaaaaaaaaaaaaaagaaaatctcattagtgaacttatctttgcagctgagtacttaaattctttttaaaaagataccctttggattgatcacattgtttgacccagtatgtcttgtagacacgttagttataatcaccttgtatctctaaatatggtgtgatatgaaccagtccattcacattggaaaaactgatggttttaaataaactaattcactaatattatttgtcttacatgcattttcttttcctagtgccttatttccctagatagaaaaagtactattgatgattttaaatacctttgagttagttaatttatgttaatttgggttttttggagaacatgtttcctgaaagtatacaagatttaacatcaaaatctatttgctaagtttactaggagaagtctgttaggttttgaaattatcatggaagtttaatagatgctgtcgatcattcacatgtttagatgcttaaaaaaaaaaaaaaaagctaagt

SEQ ID NO: 1723 - protein, 618 aa, Homo sapiens
MGVGRQQRGPFQGVRVKNSVKELLLHIRSHKQKASGQAVDDFKTQGVNIEQFRELKNTVSYSGKRKGPDSLSDGPACKRPALLHSQFLTPPQTPTPGESMEDVHLNEPKQESSADLLQNIINIKNECSPVSLNTVQVSWLNPVVVPQSSPAEQCQDFHGGQVFSPPQKCQPFQVRGSQQMIDQASLYQYSPQNQHVEQQPHYTHKPTLEYSPFPIPPQSPAYEPNLFDGPESQFCPNQSLVSLLGDQRESENIANPMQTSSSVQQQNDAHLHSFSMMPSSACEAMVGHEMASDSSNTSLPFSNMGNPMNTTQLGKSLFQWQVEQEESKLANISQDQFLSKDADGDTFLHIAVAQGRRALSYVLARKMNALHMLDIKEHNGQSAFQVAVAANQHLIVQDLVNIGAQVNTTDCWGRTPLHVCAEKGHSQVLQAIQKGAVGSNQFVDLEATNYDGLTPLHCAVIAHNAVVHELQRNQQPHSPEVQELLLKNKSLVDTIKCLIQMGAAVEAKDRKSGRTALHLAAEEANLELIRLFLELPSCLSFVNAKAYNGNTALHVAASLQYRLTQLDAVRLLMRKGADPSTRNLENEQPVHLVPDGPVGEQIRRILKGKSIQQRAPPY

SEQ ID NO: 1724 - DNA, 101438 bp, Mus musculus
  misc_feature (1)...(101438): n = a, g ,c or t
tggcctctgtatcagctcctgcttcctgatctgcttgagttccagtcatgacttcctttggtgatgaacagcaacgtggaagtgtaagctaaataaaccctttcctccccaactgcttcttggtcatgatgtttatgcaggaatagaaaccctgactaagacaccgggtgtgcttaagagctagtgctgtgttggttgtcactctgggatactcagtcaaggtctcaactccccatcaatttcaaagtgttcagatcaaagaacacccgtgttgaactggggaactaaagaagactcatactgtcagaattgcctgcaattgtcctcaacgtttgccgtatgctgactctggcaatcttgcgactatttcctgcaataaatgaaaagccatgccatttctgtgaagaaggcacaggctgttttccctccaggcctgacgcaagcctgaaatagagaagtttacggctgaagcagctgcaggaaagaacaagtcaggaaggcagtgtgtgcagagttgtcttcttaaggaaacaacggtggctaagcccttttcatttcccctgtaaataagcagatgtcagggtacagggtgatttgactgtgtagcagccaatggatgctctctttgcttccctggaaaaaggaaaagagaccccccccccacacacacacacaatcagccagctgaccacctttataaacagtgctgtctctctggaacactctgcagatgcttgggaaagctataaaacaaccacggctgcttgcttcagcacctgtgggtgcagcctgagacacaactattccaagcagcctacacggggttttgtctgcactcattgctcagacctaagggaggcacagctgagggattgctgtgtctggtagaaaaggaacaatgctatgattattgttaaacatggatctttgtctgcacaaacatctgcagtgattgccacaaacacccccccccccctttcagactacagcagcaaactgttcagctatctcagtaagcctgttaggtgatagcctccattacaggaggcattacagccttctttggcggtgcaacattgggcctgacacaaggtttacttacagtgggataaactgggcctcaaaatgaagcaagcagcagagtgccaagagagtcaggctgtgagctttacaaaggagtggaacccagcggctggcaggcagagccgagagaggggcagccagcggctggcaggcagagccgagagaggggcagccagcggctggcaggcagagccgagagaggggcagccagcggctggcaggcagagccgagagaggggcagccagcggctggcaggcagagccgagaggtgcagcatgctcagaagcactggtgagctgcagaagagaagaggcatctccgttggctgctgctggtagcaccttccaggtggccataaccatggcagcagccatagcaacaagaagctgctacagtttgagggggagaggggcagaagtggaaagaatggggaatgggcagattgaagctgaaatggagccaataagataaaaatgagagtgcaagagcttagaatagtacagaaatagcagaattgttaaagaaatgcccattcggacaaacaacatctgttagcatcaagtatctccagagaattcagttacaaagtgaaggagtctaataagcaattgtcctgtctaataagcaattcagggacaaaaatggagcagagaatgaaggaatggctagccaataaccagcccaacttgaaacctatcccaagagcaagcacaaatccctgacattattgatattctgttgtgcttgcagaaaggagcctaatatagctgtcctctgaaaggctccacccagcagctgactaagacaggtagagacaccctcagacaaacagtggatggagtttggggactcttatggaagatttgggggaagaattgaggaccccaaaggggatagggactccacaggaagaccaacagagtcaaactaaactggacccttggggacttccagagactgagccaccaaccaaagagcatacccgagctggactgtgtatgcccccccccccatatgtagcaaatgtgcagcttggtcttcttgtgggtcccgaacaactgaggcgggggaggggaggctatcagaaagctgtagcctgtctgtggaaaatgttcttctagctgggctgccttgtctggcctcggtgggagaggagatgtctctaaccctgcagagtcttgatgcagcagggtgggggatagcaagtggaggcctaccttctcagagaagggagaagggaaagggaaagggaatgggaggagggactctggctggggaagcggggtgggcagcatttgggatgtaaaataaaatggagtcttcagtcttcagagctgtgagcacactgctgtggatactgtgtttccatctctacctctctaacacacacacacacacacacacacacacacacccatcttgctgagatgtgtactggctcccctccctcttctgctttaaacatctgttgaaaccttggtatgaaggtaatggacccaggcggccgctgctccctctccaaggcagagctgtttctacagcttttgtgttccggtggccagctgatgtaaagatggcccaaaggtttgatttaaagctcatcaaaaacttgtttcctcgttcttcattgtcaccacctttcctcacaagagggacaaaactttgatgtagtgatgtaagaaggatatggagtgaggtatgccaggtgtcctgatcgtttctttagatccagcactagggaagctctcggagtttgcctccatcctggtctatatggtgagttccaggatagttaaggctgtccagtaacaacttcacacacacatacacacacactcaaacacaaatacaaacactcatacacacaatgacacacacacacacacacatagtcatacacacatacaaacaaacacatatacacacacagacacacacatactcacacacatagtcatgcacatgcgcgcacgcacacacacacacacacacacacacacacacaaacatatatacaaacactcaggcacacacatacaagcacacactctcaaacacatactcatacacacacagagtctcacacacacacagacatacttacacacatactcatacatacacacacagacacacttacacacatattcatacacacacagagtctcacacacacagagacacatttacacacatactcacacacagagtctcacacacacacagacacacttacacatatactcatacacacacagagtctcacacacacagagacacacttacacacatactcatacacacacagagtctcacacacacagacacacttacacacatacacagagtctcacacacacacagacacacttacacacatacttaaacacatagagtctcacacacagacacacttacacatatactcacacacacacacacagagtcacacccatcagaatgagttttatgttttggtttcaaacctattaaaacaaagacaaaataatatttaatttttttagagtaactataagaaacatataaaaaagtttcttaggaaaaactgtgttacaaatagtaaattataggttcttgccataattcactttttgtaataatgtgtctattctctaaagaaatcatctgttggggctggtgagatggctcagtgggtaagagcacccgactgctcttccgaaggtctggagttcaaatcccagcaaccacatggtggctcacaaccacccgtgatgagatctgatgccctcttctggtgcgtctgaagacagctacagtgtacttacatataataaataaataaatctttaaaaaaaaaaaaaaagaaatcatctgttaaacaaaaaggaaaaaagtcatctgtactctcccattgacatgtaatttatgacagatacaagtaacattacctaattctgaaaatcagactcttgagtgtacatcttaagaaatacttatggatgggtaagggtaagccaaataaagcaccactccccctcctcctcnnnnnnnnnnnnnnnnnnnntagagtaactataagaaacatataaaaaagtttcttaggaaaaactgtgttacaaatagtaaattataggttcttgccataattcactttttgtaataatgtgtctattctctaaagaaatcatctgttaaacaaaaaggaaaaaagtcatctgtactctcccattgacatgtaatttatgacagatacaagtaacattacctaattctgaaaatcagactcttgagtgtacatcttaagaaatacttatggatgggtaagggtaagccaaataaagcaccactccccctcctcctcctcctcctcctcctcctcctcctcctcctcctcttcttctgtttgtttttttttttcaagacagggtttctctgtgtagccttggctgtcctggaactcactctgtagaccaggctggcctcgaactcagagatccacctgcctctgcctcttcagtgctgggattaaaagtgtgcgccaccacgcttggcgcgtttctcttctaatattgttgttggttgtgttataatagcaagagagacaaaactacagtgctaagtatatatttctcatgcacacacacacatccacaatctctgtgtgtgcatgatgtgtgtggtggtgaaagcatgtgccataccatgcacgtggagggcagaggacaacttcacagagtagcttccttcctttctgtgaattcaggtgacctagggcaggaactcaagccgttagtcatattatatccgcagtcgggaccaagtacagaataaatgcatcctagcttgagaaatgcctcagctcaatgagctttcctcactttcctaccgttcgaagctcagcccgtgaaatggtgtgacctgaagggcaggtcattcctacaggaactaacagcatcaagactaacctccacaagcctgcccaacctccatctagataactccccttctctcagatggtcccaggtgtgccatttacagctgcccatcacatagagtatacaccgcttggcatcagaggctaaccaaccactcttggactaggtaagactctttgaagaaaaaaatgaataggaatgagtggattttaggaaaggtaaattcagagagggatttagtggtgacgatgagaaatgtaatcctggaccactaacaacacactgtgtttcgatgacagccctcagccatacctctaacacaattgtaattcacaaacgcaagagcgtcatactataaacgctatctaaggtgtgatcacaggccccaaatgggtaagtaaccatttagacattgacaggtaaagatttttgttaacttatacgatgaacatccgatctagcttcttggctaaagatagctgtattatgccccatgtgagtttatcaagttggccacatgtccacaccatctacttagtatcctctaccccaaggacaaatgacttgcattctttttagtgatgtggggtggggtgggggagcagttccgcaaaagccagagcaaaattggaattctccacacgtgttccatattctgaattgcttggattatttttctttagaaatgggaatgtgatacataaagagggtgagtatactgggaagagaagttagacctggaggagaggacaggagtaaacttttcagaataatcagacatgaatggcttagaagttatgaaggatgaaacaacggagctgcatccatcatagatgtggcaggtgaggtagcagggagagtcatttgtttagatattttgggcaaatggatgtgagggccatcctctgtgggaggaacctgaggccttcatgaggcatgcaggtcaagatgtctatggtcagttgagtgctcatgtcaggaccatgttgtgagtgactctcctccaagccaagcaaacaacatcttggggagtttggctgtgttcctgtgtaaaagtaccctacctgggcttgttggctgtttaccttcccacatgaagggactggggaagctcagaagccccctgcaccccacctgagtatctcctctgcctcaattctgcatagcctctgtggcctctgagagaggctggggaggtttacactggagaggagagctccatatgttctgctacagtaaagccctcgaccctgctggctttccaggtatgaccttttcgtggtaagagcatacacagacccataacaaccctccccctaccgatgcgctgcaaggaatccacagctgggtgagcttcggtgagatcgtgccttggtgtgttcggaaccccaggaggaggggtagatactgcttatgtctccactttcgaaggactttcagtaacagcttgacaagaccactttcagagagagcgaagtgacaggctgtttgttattattatttttttatttccatagtgctaaatttaagaatttaagtgaggctttgtgaccccaggggaggggaggactcgtgtctaaatatcctcgacaatcacattctgtactttgtaactgagatggtgagctagcctgcctaggcaaactggtgtctggaggttccatagtatctgatgtctgtactgcaggagggttggatatttggaaggtttagaagcttgtactttcatatagtactcagtatctatataatgaagtcttggggttatctcacactggagcaaactcaaacggtgtgtatggcgggacattcctgtagatccacagtgttcactgctgtttgtcagtatggggttatagagagtaacacaagtagggaagcagtcactgaaatcatcggtgcgaataacgtcacggagagaataaactgagaagagtgccaagaatggaattctgggaaacaccagtgtctaagatacagaaaaagaacattaatggtgttcaagcctgcaggactggacaaatataaaattaggctgagtgacatttgcattctgtcctttgactgagacaaatatttcagaatgacattggacaagtttttctgttataggttgttgttgttgttgtttttaagattattttttatgtatgtgaatacactgttgctgtcttcagacacaccagaagcggacatcagatctcaattacaggtggttttgagccatcatgtggttgctgggatttgaactcaggaaactctggaagagcagacagtgctcttaaccactgagccttctggctcattgttaaagagataaaagtgtagggacctagtggcaactgtcggttgcagggggagaggtgctattttctttggcagttgtacctactggaaagtagcccatgctgcagaaataatctcttatccatgctcatgcaagcaatcttcaactcagtgacacacacacatgcatacacatatgcacgcttgcacaaacaagcacacacttaagcacacaaatatgcacatatgtgcacgcatgcacaaataagcacaaacatatgcacacacatgcacatgtgcacacatatgcgcacatgcacacaaacaagcacacatgtgcatacatacacaatatgaaaattagaggaaacttcttaggaaggagagtttcagcatagggaggaggaatgggagaatgagatagtaatgaagatgggagttattacaacctactatacacacatacgaagctgacaaaaataagtaaactaatcaaaatattcttaaaaggtaccaggagaacaggctgacttcccatttttcaatgtgaagagggaacatcaagaaaaaaagaatttcactgattattatgtttggacaccacagaagaactgtgtgagtgatgacctgtaatgagcccttattttttttattttttatttttttgagcctttattttctaacatcactttgaagcacacgtctttcctctcagctctggagaggcagaggcagaggcagaggcagaggcagaggcagaggcagaggcagaggcagaggcagaggcagaggcagaggcagaggcagaggcagaggcagaggcagaggcagaggcagaggcagaggcagaggcagaggaggcagaggcaaaggcagaggcagagaggcagaggcagaggcaggcagagctctgtgagtctgaggctggcctggtctacctagtgagttttaggacatccagagctacacagtgagaccctgtctcaaagaaaacaaaacaaaacaacaacaacaacaaaagcaaaacaaaatttcaacttgaattcctcaactctacaaaggtgtcaaagatgaaagaaaattattttcagtaagttgtgccaaagctatctataataaacccaaaacattgtgttagaatctgtgttagtagcccagttattagatcatttcagaaaacttcaaaatacagctcccaactcaaagaaagtaagacctaatctgttctgtagcccaacatgaaggaccaaggctcaggaagacagattcaggttgcccccaaacaccaccatccaacacagtagcattttcataaagtttttataacaaagcaaagactcccttaaggcatttgacaaatgcattagagcaggggttctcagccttcctaacgctgccaccatttaacacagttcctcatgttgtgctgactcccaaccagaaaattatcttcaatactacttcgtaactgtaatcttgctactgttatgaacaatagcataaatatctgacggtcttaggccacccacccctgtgaaagggtagttccactcagaggttgagaacatcaggtaggtgagttacagcaaaactggaaactttctgtcacgcccctcagggactatctgatagtgatcgcctttgagtcattggaagttaggaatctgatggcacattccaaaaaaaaaaaaaaaaaaaaaaaaaaaaaaaaaaaatgacaagggtgttaggtcaaacacagagatgacagtaagtggatacctgggggcaaaagataaccaagatagttagattctagacttgcaacattccatcttcccataatcaagacgttccaatcagtctcacagacatagcttaacacagacatagcttcctcctcttccaacttcaatccacacaggctggctttgctcatccgaacaatacgctgaaattatttctgcttcctgcttattacaacagagaaatgtcttgggcaaaaatagactcacctggaacatcgaaaaagctcacgttagtttttgccttacatttatttggcacttctgatctaatgaattggttccttatttgagcgtcaattacctagtatgttctaggtatacagtcagggaggtgggtgggtggggcggggagataacaaaaacaaagcaaaataaaaacataaaagggatctgtcggtggaaggcggggagggggcggggagcaggaggagtcttgttaacagataaggaaaatcagggacgactccgcagttaaataaaccaaagtcagtcgatttggataactccgcaggattgtcgtttaggttccccaggccggggaggtaggagcaagacgctgatttgtgttttaagtcaggggggtggggatcaaggaggcagaagtgacggacaagacaaattcattttttaaaaaaagcaaatatttatagcagaagagaatggatcacaaacagacgtagggagacacctccgatcatccccaggttaccagccagccaaaaaaaacaggacgcgcctgcgcagctgtgccggccacctgcgtcgacggcgggggcggggtccgcactgcccagctggagctcgttctgggcttctcgctcggccccgcccctccagagactcgcctccggattggcccgggcgggggcggggcccggagtccggaagtgcggctgacgtgtccgggccgcgctcggaattgtgggcgactgggctaatggcgtcggcgggtctgggcacccggggcgggcatcgctgaagcttgtggccagctcggccggtgacgcccgccgtggccaggccccgcggcagcgggagggacctgcccgtctggtgggctcctgagccggcgccggtggagcctggtggggctgcaccgctgcgggcaggtttcggcgagcggccggcggcggtgcggggcggcccggggggaactcgggcacgcctcgggagacgcagcccggctccggccgtgcgcccgcccgcccgcccgcccgccgagccctgggccccggctaaggaagactgaggagccgccggctggctgcgggccgcgcaagctgctgacagtgcctgcttggtagtgctggtcccagatcggcggtgacctggagggaccatgtcctgcaccaacagccccgaggctgtgaagaagctgctggagaatatgcagagcgacctgcgggccttgtcactagaatgcaagaagaagttcccacctgtcaaggaggtaggtcccaggcgacgtcaggggcgggggggggggaacgtcacgagcgctccctggtcctcgtagaccgctttcctcgattccccaacacctatactaattttcattccgccagttaagtttggtgattgcccagcaaaggctgttcgtagaattcttttgagagttccaaggagatttgatttcttccattctcttgttatgtttatttcggagcgaagttccatgagtgagccggtttggtgacactcgagtcaggtatattgctcctaagaatgagtatccaccgctgtagcggaatccgttctccatacttaggtgggcatagtgtgtgggaacatttccttcttgtctgtgttattcagcccacctaaaaatctaatcgtcgtgataaactagagccccaaattacagcaaatggtcaaggcctacgataaccatgttaagccctgcacaagcagtattctagtaggatgctttgcaaaacaaatatatctgagtatatatagcctcttgggtgcataatttgttgttgttgttgttgttgttgttgttgtttttcagctgtagaatagctgaaaattgtggtaccagtataggagaccgggtgtggtagccaaacttttagctccaatactcagatgcgagtggatctctgtgagttagagagtggacaccaggacaaccagggtacataaagagaccttgtttccaaaaccgatggtggtgatggtgatgatgactggggctcacaggacgagtatcagggagctcaatgtatgctaataaaattttccagatattgaattgaaaaattgagtttagtcactaatgcctgacttttttcttttaagattccatttttgttgaaatattttaaaaactgccctttcacatttttaaactattgtagttcaggggtcaggctcggcagttaagagcacttgctgctcttccagaagtcccttgttcaattcccagcacctacatggtggctcacaatcttgtgtaattccagtttcaagggatctgacctctttcttctggtctccaaagacaccaggcacacatgtggtgtgcaggcatacctacaagcaaaacacccatacaaatataacaaaaatgaatacatctaaaaaaaaactttaaaaatagtgtagttcaaagatatgtaaaaatagttaattttatttcctagttaatatagcttacttagtatacctgaaattttatcatactacttgctattaaatgttacagagtgagttcatatttttctacttacaactatctttatgaatactgtaagaagttttataattagaacttgactagtaaagtttagaatgcagacttgtcaggaatcttgaaattttccatgagtgccttgcttttacctgtttgttccagttacctttagtcccagcacttgggaggcagaggcaggtggatttctgagttcaacgccagtctggtctacaaagtgagttccaggacagccagggctacacagagaaaccctgtctcgaaaaacaaaacaaaaaaaaaaaaaaaaacaaaaaaaaaaaaaaaagaaaaaaaaaaaaagaaaaaaaaaaaagaaaaaagaaaacatcaaatcctactgtcatttcagcagtaatttatagagctgtggctgttcccagtcctagtgaatcatgttaagagctgtggctcctctgtgctattggcttctgtgctttaaccttggaatttaattgatatcgtctgtggtatttttattgggaaaaaccactcttccagcaggtaagttacaaagttctagaactcaccacattcctagtcctggagctctcatggcagctccttagtttctcctagatcactgcctagacagctacttggtaattgcttccagcctttgcagtgatggcaagcatcattctcctgattgtctctaatacaccatctcgtttatgctgcatgttccataaggatttgctgagtgagagtcttcctggggcttgacagatggctcaatggttaagagcactggctgttcttccagaggacctgggttgattcccagcacccatatggtgctctaaactctgtaactcgaattgaaaaggaccggatgccctcatccggccttcactggcaccgggcacatgagatccacatacaggcagacttacactgtcacacctggtgataagcaccactactacagagccatccctgcaggccccatctccctttcttgatatcaccacaaagcataaataacaattagtggttccaggctgtgtactttcaaggttttctgttattatctggcgccgtggcagagtttttgcctaaatcagaagttccccatggcagagcttttgttctgtgttaattggtggctgctgaagacctggtgacagaatgccttgtattgccacagcagggttctctgtccttttattagggatctgaggcgaaggttcttgcctctgtgtgtggattcagagttcattttcaggacagtgaagaagagaggctggctaatctagctgtgcttagttgaaagctgttttagtgtagaagtttataatgtagttatttcctctatgagggtggtctttctctcacaagtaaaatagtataaattcctgtcttatgttttgaaatcataatagagacaaatacataagtatttgcattgtattgattacttcatggcattgtgctttgatcacatagaaataaagacactgtgtatgacttcaaatcatctttagtctttttctctctttctccaaggtagcttacttttaaccaagaacaaagcaaatttgtgctactagttagtccagaccaccttattaatctcttaagaataaaacatggaaaaaaagtaacaaaaatagaaactatctttctcttcatgaaatgagtttgattgaataaaatataacatttacaacagtgtaggaaactttgcatcttttaacatgccactttaaatattttatagtgaggcacacctagaacctagcacttagaaggctgaggcaggaagatctcaagttctataccagactgagctatatcacaagactctgtctcataagaaaaagaaggcaggcatagtatcacccacagcacttgggaggcagaagtggtcaggtttctgagtttgaggccagcttgatctacatagtttaaggctggcctgggctacatagtaagacactgtctcaaagaagacgagagtgaactaaatcagtacttcatccacacgtgaggagctccagagggttcagtaagatggcaaagctggaatgggaaggggctgcatgtgaccccctgtgtacccatctgtaagtctcctcttctcatagtggcatcctgcagatgcctcgctgttaccattgcctgtctacatcattacttaggctattgactgttccttccctctgacactttctcattttgagatttgtagcacactgtgagtgtgtctcctctctcaggagtcctgttgttcatgtgtgatcgtatcctggtttgtctccaaggctttcctcatgttcttccctgcttgctgccactcccctgacctttggccttaatgtgatgccagtggctttatctgtgtcatccactctggtttccgtcagcctgtgtaacacctaccaggatatctcccacatagttcagatagacttcttgtcactgaaccacctctgtgttagtatgccctagtcctttgtcttgttatggttacatcatttgcttatgttactgtgtaaggctgccttggctctcctgctgcttcctgtccttactagctttctttttcttccctattttctcatgtactatcctacactgggttttaacatcatacctgacttttgatgagtatcaaggaaataagtaaattagcactattggttgctaccatgtgatcattaagtttcttaggatagcactcatacctgcttgatccccaacttctctggcgacctcatcctcacacactttacctaagcagcaatcatacattagtcttcaacatgcctggcttccccctttcatgcttcggatcctagtttaccattggctccctctgccccacatttagaatagggtcttgtattaactcagccccgagttcttcccagcccatttatcatgaagtgagtcccaggtgctttcactcccccctttgtctgtctgtccatccgcccatccgtccatccatctatccatccatctgtgagattatctgtgaacacctaactgtgtgccaactgcaagctggctgctgagtaaaacctcctgtccaggcttccaagcttgtctgtctagtgtgctctctgctaaagccaaaccaaatcagaccagaccagacaaaccaaaccgacccaaaaaacctttctcttaatctttttgcatgttattttttgttgttgttgtttctttctttctttttttcttttcttttcttttttgtttgtttttcaagacaggatctctctgtatagcccttggctgtcctggaactcactctgtagaccaggctggccttgaactcagaagtccacctgtctctgcctcccaagtgctgggactaaaggcatgcgccaccactgcctggcataaactattttctttatctcttacattttaccttctgttgtacttttgagtttttcctgcttttttttttttgtaaggattactattgcatcacatctaatccagccactgtagcataaaactgtatacctggaacttatgaaccagagcctttattgaagtttaaagttggaagaaaaggctgggaaagagaaaggcgtactgtatggatattagccatttctctgcaccctgcattccagccttccattactgactaaagaaagtgtatttcttggaaaccatgagtttggaataaaatgtcatgtggtagttgaaactataattgtaggataattgaatgttacagaatatttttttttggtttcaattgtaattgttttatgagcatattgtcctttaaggggtgttctgagtccttttagcactctcaagtgtgtatttgactttagctcttagcatttgcctgacatgtaaaaagtcttcaaggcatccccatacttcctttgtgtctcttgaatacattatattatctgagttgaaaataagttaaatttcagttttctttaatttccatttcactgctgtgctctatgaataattaattaggatttttgttttaactttagattatttttctcatgagctgcaaaggatatatttgttaaaagcagaagcatgagtttttatgaaaggaagcaacatttaaaaccagttgttagtttttgtttttaaagcagtcccatgtaccccaggctggccttgaacttatttttgggtgaagctggccttgaactcctgaatctcctgcttccttcacccaccggttgggatgatagacacgtgccaccattcccaatttataagcattaaagaaatgtaatctgtagtagttctagtgatgggcatgtccattcattctgtagcatacattatttcccttccttcattggtaatctgcattcttcacccagaaccctctggatgtagatgaactaatttaattctacctactgagtgctttgttggcttaatctagttctactctccaccttgtggctggagaggtggctcattggttaagaatacttattgctcctatagagaactcaggtttggtttccagcacccacatggcagttcccacccagccataagtccagttccagagtatccaacaccatcttctgacttctgtaggtattgagcatgtgcatggtgcacacacatacatgcaggcacaacactcatacacatttaaaaagaaatccccagaggagaggtgtccgcccggcccgggagggaattaccagagcatctgcaggagatatcccggttcacggactccaccgagactagtctgcacaggtgagagtgtgaactacagaagctaacagcttctgggacaggcaggagccacagagcttctgaggcagcccccttttcgggctccagacatcagggcaccttccctgccagaggagaagtgtccgcccggcccagaagggctttgcctgagcatcttcaggagacatcttgattcccggactccaccgagactactcttcacaggtgagagtgtagactacagaagctaacagcttctgggacaggtcctgttttgggccttcatcttctgccaggagggaagtctgaacgacagatatctgtgcaccttccctgaaagaggagagcctgcctgcagagagtgctctgaccactgaaactcaggagagagctagtctccccagtctgctggtagagaataacagaatcatgagaggaacaagctctaaccagagacaactataacaactgactccagagtttaccagatggcgaaaggcagacgtacgaatcttactaacagaaaccaagaccactcaccatcataggaaccgagcactcccacctcagtcagtccagggcaccccaacacaccggaaaacctagacctggatttaaaggcatatctcatgatgatggtagaagacatcaagaaggtctttaataactcacttaaagaaatacaggagaacactgctaaagagttgcaggtccttatagaaaaacaggaaaacacatccaaacaggtgatggaaatgaacaaaaccatattagacctaaaaagggaaatagacacaataaagaaaacccaaagtgagacaacgctggagatagaaaccctaggaaagaaatctggaaccatagatgcaagcattagcaacagaataaaagagatagaagagagaatctcaggtgcagaagattccatagagaacattggcacaacaatcaatgaaaatgcaaaatgcaaaaagatcctaactcaaaacatccaggaaatccaggacaccaatgagaagaccaaacctacggataatagtagatgagaatgaagatttttcaactcaaagggccagcaaatatcttcaacaaaattatagaagaaaacttcccaagcctaaagaaagagatgcccatgaacatacaagaagcttacagaactccaaatgactggaccagaaaagaaattcctcctgacacataataatcagaacaacaaatgcactaaatgacgatagaatattaaaagcagtaagggaaaaaggtcaagtaacatataaaggcaagcctatcagaattacaccagatttttcaccagagactatgaaagccagaagatcctggacagatgttatacagacactaagagaacacaaatgacagcccaggctactatacccagccaaactttcaattaccgtagatggagaaaccaaagtattccacaacagaaccaaattcacacattatctttccacgaatccagcccttcaaaggataataacagaaaaaaaccaatacaaggacggaaatcacgccctagaacaagcaagaaaataatccttcaacaaacctaaaagaagacagccacaagaacagaaagccaattttaacaacaaaaataataggaagcaacaattacttttccttgatatctcttaatatcaatggactcaactccccaataaaaagacatagactaacagactggctacacaagcaggaccgaacattttgctgcttataggaaacccatctcagggaaaaagacagacactacctcagaatgaaaggctggaaaacaattttccaagcaaatggtctgaagaaacaagctggagtagccattctaatatctaataaaatcgacttccaacccaaagtcatcaaaaaaagacaaggaggggcacttcatactcatcagaggtaaaatcttccaagaggaaccctcaattctgaatatctatgctccaaatacaagggcaaccacatcattaaagaaactttagtaaagctcaaagcacgcattgcgcctcacacaataatagtgggagacttcaacacaccactttcaccaatggacagatcatggaaacagaaactaaacaggaacacagtgaaactaacagaagttatgaaacaaatggatctaacatatctacagaacattttatcctaaaacaaaaggatataccttcttctcagcacctcatggtaccttctccaaaattgaccacataattggtcacaaaacaagcctcaacagatacaaaaatattgaaattgtcccatgcattctatcagatcaccatggactaaggctgatcttcaataacaaaataaataatagaaagccaacattcatgtggaaactgaacaacactcttctcaatgataccttggtcaaggaaggagtaaagaaagaaattaaggactttttagagtttaatgaaaatgaagccacaacgtacccaaacttatgggacacaatgaaagcatttctaagaggaaaactcatagctctgagtgcctccaaaaagaagctagagagagcacacactagcagcttgacaacacacctaaaatctctaaaacaaaaggaagcaaattcacccaagaggagtagacggcaggaaataatcaaactcaggggggaaaccaaccaagtggaaacaaaaagaactattcaaagaatcaaccaaaggaggagctggttctttgagaaaatcaacaagatagataaacccttagccagactcactagatggcacagggaaagcatcctaattaaacaaaatcagaaatgaaaagggagacataacaacagatcctgaagaaatccaaaacaccatcagatccttctacaaaaggctatactcaacaaaactggagaacctggatgaaatggacaagtttctagacagataccaggtaccaagttaaatcaagatcaggttaatgatctaaacagtcctacatcccctaaagaaatagaagcagtcattaatagtctcccaaccaaaaaaagcccaggaccagatgggtttagtgcagagttctatcagaccttcaaagaagatctaatcccagttcttcacaaactattccacaaaatagaagcagaaggtactctacccaactcattctatgaagccacaattactctgatacctaaaccacaaaaagacccaacaaagatagagaacttcagaccaatttcccttatgaatattgaagcaaaaatactcaataaagttctcgctaaccgaatccaagaacacatcaaaacaatcatccatcctgaccaagtaggtttcatcccagggatgcagggatggttcaatatacggaaatccatcaacataatccagtatataaacaaactcaaagacaaaaaccacatgatcatctcgttagatgcggagaaagcatttgacaaaattccaacacccattcatgataaaagtcttggaaagatcaggaattcaaggcccatacctaaacatgataaaagcaatctacagcaaaccagtagccaacatcaaagtaaatggtgagaagctggaagcaatcccactaaaatcagggactagatgaggctgcccactttctccctacctattcaacattgtacttgaagtcctagccagagcaatttgacaacagaaggagatcaaggggatacaaattggaaaggaagaagtcaaatatcactttttgcagatgatatgatagtatatataagtgaccctaaaaattccaccagagaactcctaagcctgataaacagcttcaatgaagtatataaaattaactcaaacaagtcaatggcctttctgtacactagggataaacaggctgagaaagaaattagggaaacaacacccttctcaatagtcacaaataccttggcgtgactctaaggaagtgaaagatctgtatgataagaacttcaagtttctgaggaaagaaattaaagaagatctcagaagatggaaagatctcccatgcttatggattggcaggatcaatatagtaaaaatggctatcttgccaaaagcaatctacagattcaatgcaatccccatcaaaattccaattcaattcttcaacaaatttaaagggcaatctgcaaattcatctggaataacaaaaaacctaggatagcaaaaactctgctcaaggataaaaaaacacctctgggggaatcaccatgcctaaagctgtactacagagcaattgtgataaaaactgcatggtactggtatagtgacagacaagtagaccaatggaatagaattgaagacccagaaatgaacccacacacctatggtcacttgatcttcgaccagggagcaaaaaccgtccagtggaaaaaagacagcattttcaacaaatggtgctggcacaactggtggttatcatgtagaagaatgcgaattgagccattcctatctccttgtactaaggtcaaatctaagtggattaaggaactccacataaaaccagagacactgaaatttatagaggagaaattagggaaaagcctcgaagatatgggtacaggggaaaaattcctgaatagaacagcaatggcttgtgctgtaagatcgagaatcgataaatgggacctcataaagttgcaaagcttctgcaaggcaaaagacaccgttaataagacaaaaaggccaccaacagattggcaaaggatctttacctatcctaaatcagataggggactaatatccaatatatataaagaactcaagaaggtggactccagaaaatcaaataaccccattaaaaaatggggctcagagctaaacaaataattctcacctgaggaataccgaatggctgagaagcacctgaaaaaaatattcaacatccttaatcatcagggaaatgcaaatcaaaacaaccctgagattccacctcacagcagtcagaatggctgagatcaaaaattcaggtgacagcagatgctggtgaggatgtggagaaagaggaacactcctccattgttggtgggattgcaagcttgtacaaccactctggaaatcagtctggcggttcctcagaaaattggacatagtgttaacagtggatccctcaatacctctcctgggcatatatccagaagatgttccaaccggtaagaaggacacatgctccactatgttcatagcagccttatttataatagccagaagctggaaagaacccagaagcccctcaacatatgaatggatacagaaaatgtggtacatttacacaatggagtactactcagctattaaaaagaatgagtttatgaaattcctaggcaaatggatggacctggaggacatcatcctgagtgaggtaacccaatcacaaaagaactcatacaatatgtactcactgataagtgtatattagcccagaaattagaatacccaagatataagataaaatttgctaaacacatgaaactcaagaagaatgaagaccaaagtgtggacactttgccccttcttagaattgggaacaaaacactcatggaaggagttacagagacaaagtttggagctgagacgaaagaatggaccatctagggactgccatacccggggaaccatcccataatcagcttccaaacgctgacaccattgcatacactagcaagattttgctgaaagaacccagatatagctgtctcttgtgagactatgccggggactaacaaacacagaagtggatgctcacagtcagctattggatggatcacagggcccccaatggaggagctagagaaagtacccaaggagttgggggatctgcaaccctataggtggaacaacaatatgaactaaccagtatcccccggagctcttgactctagcttcatatgtattggaagatggcctactcgcccatcagtggaaagaacggcccattggttgtgcaaactttatatgcctcaatacaggggaatgtcagggccaagatgtgggtgtgggtgggtgggggagcgtgagggggactttttggatagcattggaaatgtaaatgaattaaatacctaattaaaaaaaaaagaaaaaaaaaagaaatcccatctctcccctctacctcacaacataaagcatacacctagttaaaaataaaaaaataaaaaggcttccaggtcaaaatctactgaaagactcggctttctgtctagttagtgccataggaatgctggggtgttgaataagtgcagctatttttgttgccaagattgaaggcagaaccaacacaagtatgacagagaagtagacaatagctctagtagatttgtgaatctgtggatcagagttcttgggattttttttttcttttcatgaggcacctctctgttaagtgagtttgtattttcgtaccacattaactttttatttagaaacctttattacatggctacttatttaaaagaaggcttcgtgataagcactaacaatgtaagggcttatgatgaatgggtgaagcattcctgttgaaaggtctggacagtactgaaggtgaagagcctttagtcatgtgtgaattagatgtgaatagctggtgatgctaaaacagtgcccacattgaaagaacctgcaccacagtccccatgttgttggcagtgcgtgaacctcagcagagcattgcagtgctgtgagatttagggtttgcatttgtgactgtgtaaatgttgtaattttaagaagtctagagtttcttctttgtctgtttcttgtttgttttgtttgcttgcttccctacttcagtgctttctgcagaacaggaagtactctgtgactcaattacatctccaacccaaaaatgctgtcctttgctgtgtctgtatatacttagtttgtcagagcagctctagtaaaactttccttttagaagatttccctacactgcttaattttgagaaatacttcatttgtctgtttgcccattcatttatttgcagtgttatgtactgaacccaagaacacgtatgctaggcagcacactaccacccacctacacccccagtacataattctgagatatgctaataagggtggatgacagttaaggcattgaacaatagagaacatgataggtagggaaaataagtttgaactgaggtgtgtaagtaagaggaaaaactcccaagatgggttaatgaaacaaacgttgtgattgtggtccgtgttgtaggatgatgaagctcacatgcacggttagcggccacgtggataatgctactgctcagaaagaagtgaggatttgagcacgatgaagcccagtttaccggctaaggaggtggcagttcagagtagaggaaggcagcggcttacttatttgctgtttgtttattttttgccttgaacttaagtacaaacgctcaagtttactaactcctgctctgtaggatatggatcaagaatagagatatgatttaggactcttaagcattttgaaaatcattaaaatcataaaattatgggattggtcaggaagagtttttggagtcagaatgaggccaagtgggtggttctgggaagggatcagagaagtacaatgactagaagagactctgatctcaagcgtgaagagtgttaaatgcagcaaggcacggaagacttcctctgtctccccagctctcagtgccctcagaaacatgcccgcatcatccgttcaggtctcagaactggcaacttttccctgactcttactgaacacaggagaaaaattggccatgtttacagttggtttatacaaagtcagtgatcataggaaatacattacacttttattaaaattataacagatctttttacttttatatgtgtgggtgtttgcctgcatgtctgtctgtgcatgtatttccatggaggccggaagaggctgttatatcccctgaagctggaattacgggttttgttgaacccaggtcctctgaaagagtaaccagtgctcttaactgctgagctgagctgtttctccagtcttaacttttgttgttttgttttgggctagtgtttcacttacagcctaaactggctcagcaagggcatccatcctgcttcattcttccagcatagtgagaatagggttagccaccatgcccagcaggagatagatactctgagaatagggttagccaccatgcccagcaggagatactctccccacacctctaagcctttgtacatagatacttgtttctaaagatcccattttctactggtacctctagattgtaacgaagcttttcaaactttctttttgttttttagagacagggtttctctgtgtagccctggctgacctggaactcactttgtagaccaggctggcctggaactcagaaatccacctgcctctgcttcccgagtgctgggattaaaggtgtgcatcaccacgcccagctttcaaactttatttttaatgatggttcttagatgctttaacctcccttctagcctaccacccaccagaggaaatgggaaagaaaggaatggggaagtggacctgtttgaaaggttctttggagcaactcccatctgtgttatctggaatcggcagttcagttcacagggtagcaggcagcagcaactcagttcacttgtaaacacctcacagatataccagcagtccagtttggtagagtcgggttagcaacagtggtgacactacctagcagacagccaagccttagcctcggcttaagtcagcagtagggaccaggagggagaagttcttggctgtgcctttctcagggaagtgaacatcagcaaaaatgtgagaccacagcattgctcagctagctgtaccagcaagccaagccctgtctctgtcactccatggagtcctatttataccctctacacatcacgtgtcctccacgggtcttgcttcagcatggttcttgactctgtatgtgtatacaatcaatcccagtacgaggaagaactccagcacaccagaagttctttggtgtgtttctctctacggcttcctgacaaatgtagcccaaccacacactgcaaggaggaccagtccacgcgcgttgttagtaaagaacccttcgtcaacgtgtgctttcatgtgcttgctttagcagaacagcctctctcctatgtctgcctcagcaccgtgtccttcctgagtctgcctgagcctttcacctgtgtccactttaaggaaatgttccttcacttgtttgccccagcaaaacaccatccaaccgactttccaaaaaaccctcaagtttctactccactagactatgtaggctatactagcattactatggcatgatgtaatactacagttggggttcggggactttgatacatgtattttaaaaataaacatgtttagtaaaattttctagaaacacatgttgtaaacaatggagaatcatgaagtaggtctaatgtcttaggcagcaaatagtctggtgattctttaaatatagagataaatgtgactcccccttcttttcttttcatgtgcatgtgcgtgcatgtgcgtgtgtgtgtgtgtgtgtgcatgtgtgtgtgtgtgtgttcttatgcagtcatgacttgatattagactgtagtacccacattcggtggctcacatgtacttatagctccagttccaggtggccgagtactctctctgacctctatggctccccacaaacacctacatataaataaaaaaaataaatctttaaaatatagaaaggatgttggaggctctcttaccatagtctgaggcgccgtaggtttccttagtgatatcattgagaagatcagaaagtgtattatcctcttcaacaatctgaaagattcaatgtatggataagcagcttttcaataatatcataggaatactttgatttagaaatttaccttttctattgtattggcatctactccttgtagttgcaaccagtctataagctctgtcggtccccagtccatcagggggtggtgggttctctgttctctgtaatgattccaattttgttttattgtatagtaatgtatagccataaaatgcttcaaaagtaaccgagtggatgtaatgatgtatcccaacagaaatgtaaacgtgatgtgaaaaggaaatgaattaaacttgtttgattaaaaatatatatatagagagagagaaaggaaaaaacagaattgacccgttagttcatgacagtaatttcacttgattttgaggctttacagtgtgcagtggggccgggggggggggggtagatgtgtacaaagaggagaagaattgagttcttctccttgggtttttgcttgttctgttttctgaatacacagtctgtacagtgttcaggcattccaccgaggtaggccttagagcacaggaaggcggcaggcaaagtgcagtttgcatgtgagtaaccctgatgacggggttctcttaggtgttgtgtgttatgcgttgtgtgttgtgtgtgccactactgggcctctgttgtttgcaaaacaaacatagtagtggcactttgcatttttaattttgtgtttatttctcacacagaatttctgtttatagtaagttttattttctaattatttttgttcctacaggctgctgaatcgggaataataaaagttaaaacaatagctgcaagaaacacggaaattttggcaggtaattttttttgcattgaattcaattagtagtgaagattttactaatagttaaatagactcttaaaaccaccagttttttgagcatctacttcctgcacccgagtatggtattcatacacatgacatagaacatgtgagtgccccttaattgtgaactgattttatttcccagaggtgaaagctgtaaaattccttgaaatgagagaccttaaagctaccagttcctttgaatcaaggattttcttattcacctttgctttctcctcctccaccagagctcagcgacaccctttacccgtggagagtgttcactgtgttgactgacatgctgttcttagcacatcattagtgtcatatggacagttcatgaagagatgttgggtgtgtatgtacgtaccctgacatacactgacatacagttgacccagggccacgatcacaagatgggaagacaagaaaacaaaggggtttgtttgctttgtgtttgcaaacctttgttggactggggtttcgggagggagggattgccaggggcttctctctgaccggctctcctctgtctgctcttttgtcttctttggccccttctgtccttgcacagcgatgggcatgggggagctgggagtctggagaaccatatagtgtcttcttggctcaacagattaaggtacccgagtaagcagcaggatcagaccgaatcggggtgtttgcagtatgccgcctcggtgtttcagggctccaggctaggccccctccaagtgctttctgctcagccacagcttacgtcctcagacccgctgtattccagctccaccagcctcgcagcccagcagtgctggagaaaggcaggcttgcccacacagcttaagtatcacagtctgcacataaaacatgatttaaacaattgggagtttctaatttagagatgtcatcgcattacaacatgacataaagacttaaacaagagtggatctcccttaggcttctccacttcactggaaattggccaacaggttagttttcctaagtcatatctttctcgcatagcttcttccttgttacttaactgtttatcaaatacaccatgctctgtgtgtgtgtggagggtaaaagcaaaggtgtgtgtttgggatggaaccagtggacaaggaggttctgggaggtgcagttgggtggtctggctgcttatcctctgtgagggagcgcatgtttaaaggtattttatggcctggatttttgaacatggagacttactacagttgaatcagagtaattgttgtaaaatatttacctttgctgataatataacaaattattaattattattaacaattatcaattattcagtaataattttcattgttcttatagttaatagaagatcttcaaagaatcactatgtattctagtattgtgtacagagtgaaatatctaagcttacagaagaataagagattttagagttattgagatggctgagggagtgaaggggcttgccccaagcctgcttcccttcgatttttgacacccacatgatgagaggaaagaacagactcttgcaggttattttctgacttccacatgtgtgctgtggcacaggcacacccctctgcacacaaaattataaattaattaattaataaatacataaatattttaaagaataaaacattttaatatatagctgcattattgatttcattgtaatataggtagccatatttcacatcacaaatctttatactttaagctacatattttctaggaccattaatttaaggagatagatcagcatttaagcttgtcctagcatgtttatttatttactatttttattttatttatttaatgtatgagtgctctgttgcatatacatccgcatgccagaagagggcatcagatccccttacagatggatgtgagccaccatgtggttactgggaattgaactcaggacctctagaagagcagtcaatgctcttaacagctgagccatctctccagccttgtcctagcatttttttaatgatgtatttatagcagttgatacctacatatagagacttaactgatatcttgtcatttttaaaatcaaaggctcttacatagctttaaactggtcaggatatagtttctaaattacctagttagttcagaatacaattaagactgagaaagattttactattttaattccctgagaagtttttttttttttttaaataagccttgagattatgggatactaatttggtcctataacaaatatcaaagttcccaaataattgaggacactccagtgagccaggataccgcattcttacatgtctctgtatgttcagaaaccatgcagagttgtggtgaaagttaggacctttgattcagaccctcaagccgactttagtggtgctcagccccgtttctagtcagctgtggtctcttagctcccaggggagcccctttctcagcatcctcttttaatggctgcttctctttgttctctctgctgtcatgaacgctgacatgattggaaaggctatgccaggtgatgccagcctgagcagacgcacacgcctgcacctccgccttccatgccacacggagagtgagagatgacaatgtaaaggcttccattacaaaacctaacgccttcgtctgacttctgactgctctgtgttacaactgatttattagcctagatcacaagctactaaagttcgagaaggcatgtgtaacataaaagttatattctgcttatcaagaaatcttatcaagttgtaatatctttgaaagttcaatatctaactcttagtccaaaccctagtgattacatttaccatggctgctttcaactattgtcagtacacacgcaaaacataatcactgtctgtgactgggttagctcctcatagttctccttatcttttcctgtctacacagccttaatgctaagagtctctatagcaatgagaaaatacacttcagaatttttttaatgacataaaaagcagtttacctgtttgttttggtatagtatatcaatatatgtatttgtgatatcttaaaaaaagtattttataattttatatgtatgagtatttttcctgtatctcagtatacgaaccatgtgtgtgcctgatgcacaggaagccctaggagtaggcattggatccccaggaactagagttccaggcagttctgagcctctgtttgggtactgggagctgaaatagcgtattaactgctgagccatctcttcagttgtgtaggtgttaaacacctaaaggatacatgcaacatcgtccttggaagtaaagagctcctcagaatcacaggagaaagacagctggcagctgtgctccatctgtgctctctgcttcctgcatccctccatcccattcactcgcctgctccctccttgccagaaagttcccttctaaaatgacaagctttctagaactagaaccagcattttgttgtttcttttgttgccagagtttatattacatggcaacactgagcccttcctcaatgtaggctgtgaattatatcacagagccagcctaatgctatttgggtatacacttggagtgttgtctgatcataaagtctgaaaaaggactacaggcactctggccccgttgtctcctcagaatcatgattgtgttcagatgtctcatgaagaccatcttgtcaaaataggttcatgtgtcacttgtcacttgtcaaactgatatgtcatgattacgtgtaactggaagaaacacagagctgatggcagccaggggtggaggagattcagggcccggtcctgatgtctagcactgctcataggagcaggaagagaacgaagcatgctctctctctaccacatctgagttttatggcagaatatttagggtcgtgttttaagaataaaatcctcccatgtgcgaatagggatattttgacttctttcttcctgttttatcccttttctttctttctcatggtttgtttgttctagctaagattttgagaactgtattgattgacaaggaatggaaaggaaaaacagggcatcctggcctggttccttgtatagagggacagctcccagcctcccctccatagcgccttatgtaagcttgccgtgacggcctcacctgtgttgaaccatgctcctgccccccacttaggccatgaagggagggatgctcaccgtggcacagcacagactttctgtatccactgggatgtcacctgtttctgtgctctgttcagcttgttggttatgcatgctgaatacctttgtgtcttgcatgacctgtactggattatggtatatgttcttaacactttctcaaatattcaaatattattcttgactattttctagtttattggaagatgtactttcaaagtattctcaaataatattctggatttcattggtatttatattcctttttttctggctttattagtgtgtttttttttttcctgtttttctttgctttgttggttctctattaaattctcctctgaactttattatttcttcctatatgcttttttgggtttcggttgcttatctaggacactgaagttcattgttcagttatctgaaatctttatgatgttaacatgtaagcgttcataactataaacttccagttgaaactgctagctttgttgttgtagtcctggttgttttttttttttttcttttctttttgttttttgcatctcgaataacttgtactatcatttatttgatcataggaaaattttgtccctgattattttaattacccactggccatttaagaatgtgctgtttgatctctaaacatctgtgtctttcctgtgatttctcttattattttctaattttattccattatgattccataacatgcagaattatatcagttccaaaataatatttgaattgcttacttcaatagttttacaatattgttgtgaaattattttctccatgtttgagttaaaacttccatgccctagaaagtcggggaatagggcactgtttctctcttccagtgtgattcccttctctaagctgtgctaaattagtaacttcagaatattgtcggaagttgtggtcttagtttatcatcccatagtgtgtactttgggaggcataaagtagatttaaatattcagtaccaaattttaaaaaacactcactttgcacttttctgccacactggtgtaaagtgtgttgtggttacctctccacctccctttgcttccctttcaaacagtcaagccttgcatttcttgcacatgcgtgtgtgtgtgagtgtatgtttgtgtatgtttaagattatctgtgtgaacatggacttggaacttggtgcccaatggacaataattgctggctcttgcccagagtgcatcagtcatcagtacttcaacagggaagggtagggacatgtgcacaccctccctaatctgtgcttgacttttgacaggtacagttttctgtgggctcttgcaccgaagccacagatgctgtgtggtctcatttgcactggctgtgccacgcccagaaatggcatttcacatttcagatcttctccctatattacttacattgtttcttcccgtcttctgcatagggagtctgggagtgagtagcatttgtctgtggttataaacacaaatatttagaagttagcttagcatcctgacaataagatcatcagcaggggctgaatttaccgggagagcccaagatgtataatacaattatggtgcataatacacagtggaattttgtccatctgtaaagaaaaatgaaatgatgagatttgtagtaagataatacagagggttacagatggtcagagtgacgtgcccttccctaaatggcacttgtgtttcacacccctccctgtgactcctacagtccacaaggccaggctgccaggcatgagacacccacctctctgggcaagagtggtgtgagtgttatgggtaaaatcagctcttctctggttggaattggggcctgatccataagaggaaattcatatctggcactgtaaacacgataagaaggaaacaatggctgaggtggtctttttaccttcagtcatgattatgaatgattttcttttaagttcttctgaaaaattattttctgactcagatattcctgtagttaatgaatgagttttatttccttgaaaaaggctatcaaactcctaactttaatgttccctttacttaaaattccatgctatttatttcgtttctctgaaagcgacaaacttttttttaatctattttgcctttaagcaatttttaaattttatgttataaatgaattgttcaattgaatttaattattatcactactttaaaatgtcgagagtcggtagaattaaggttaggagtaaaagtttgtatatttagtacttaatttaaaatgccctttctgtaataacaggaagaatgctattgttgtctaagaattgtgtttacttcctgaagaaattagtgttataaacattcacagcatataaaaataatgtagggcacctatgaactatggaaggcatgatgtacatacaatttgaaccactttctgctctgtaatatgaattcttgtttattttactcttgtataatatgaagaaatgttaatttctgaacttgtacccagaatcccatgttagagaaagcctgggactcctgcagttgagtaaagactgtacatctgaatcccctgaattcttatgacttgtttctgtttggatatttactttacataaaaagaattgtcataggttctaagtacgtagacaaacgttcctcaccatgcatcgatcagtaaatcatctgctgtgttttctgaataaagcattgaaagagaacagctcagaggtcgtgcagcctttcctaatggggtgtgggaccaaggaaccaaagatcacacagttgtgtttggccgccatccagagactcatgtcccatgaagtggtgtctgaggtaggttgaagattttatctgaattgcttgttaagagttacgtcagtagtgttcatgagaagattgaagtgagcctgattcctcctgattcctcctgggaggtagttttacgaaagaagagtaacttaaaaatgaagctaacattaaagatgaactgcactccagtgagctacttgtaatctaaggcagagttcatagtacaggcactgattttagaatcaagttttcagtgtcatagaatagttacagaatataattcatattttaaagtgtagattatttgaattgatagttactcattaatgtaagtattttgtttgtatctcacttgatggtggaaaataaatagtattattgtgaatctccatcatctctcagatctgagttgattttgtgtgccgtcctctgattcacagactgctgctggaaacataattaacatgctttggcagctaatggaaaacagccttgaagaacttaagctgcttcaaacagttcttgttcttttaacaaccaacacggtagttcatgacgaggcactttccaaggtaagaaacccatttaattgatgtttataaatgttttgaggtagtgtttgaataagctgattaaaagatagacgcctagagccattggagtgaagcacaagtcacttctccacagttactgtggtggtcatccttgtgagttagtccctccagatgagaggacatccgttagccagcctgtggctgggctgagtttagtgaggaatgctgagtgggagaagagcagccgtagagctgtgtcgagaagggatgtgaaaggaagggcgggcggtgccttcattgtgtcggcttcggaatttctccatgtttgctcctcagttctcctgttttgaagctacctgtatgcattgttaggaaaccaaacagctcgggcctgtctcataagtggccaaaacccttctttgagcacttaataccacatgaggtttcctagctaatttttactttcttcccttctcccatcctctttggaatataaaatcatgaaatatttctgtagaacagaaagcaacataatacagtcctcagctcatagtttatcctctaggagtgttttgaacttgtttgtttgttgagataaagtctcactatgtggccttggatggcctggaacttgctatgtagaccaggttagcctcaaactcacagagatgtgcttgcccctgcctcctgagtgctaggattaaatgccaccagggccaactttgtttcataatgtctgtgctttaaaggaaggctagttgataaagagagatgtctgcagactcagtctgcacactgtcgtaggtggctctgggtgttcatccttcctagatgttaccttggtgttctagagcataacagctttcattcttccaggccctgtctactaagtggagtgcttgtgtgcagttccatctggtttcttgctatccagttattcttgtaataactatatttaaaatgtatacactgataccacttgacatactaaagaagaagaactggggcttgggagatggttctgtcagcaaagcgtttgccgtaccagcatggggacctgaggcgcatcgctagtaccctcgtgaggagggtgggaccaagtgtgtactggcttatgctcagtgtgggaagagacaggtgacccctcggtgtcctgattaggttccttttggtcaactccatgtctacaagtaacttggggaagaagagttgcttgagctcaggttagagaacatcattgtactggctagttttgtgtcaacttgacacagctggagttatcccagagaaaggagcttcagttgaggaaatgcctccatgagatccaactgtaaggcattttctcagttagtgatcaagggggaaaggccccttgtgggtgggaccatctctgggctggtagtcttgggttctataagagagcaggctgagcaagccaggggaagcaagccagtaagtaacatccctccatggcctcagcatcagctcctgctttctgacctgcttgagttccagtcctgacttcctttggtgataaacagcagtatggaagtgtaagccgaataaaccctttcctccccaacttgtttcttggtcatgatgcttgtgcaggaatagaaaccctgactaagacaatcatcaaggacacttgaggcaggaaccgaaacagaccatggaggagtgctgtccactgacttgctcagcttgctttcttatacagcccacccacagtggagtagacccttcagatcagccattcatcaagaagctgccccacagacatgcccacaggccattctaaggaggcatttcctcaatggaggtttcctcttcctaggctactctagcttgtgttaagttaaaaaaccctgactagcacactgaggaccactgtaaaccgtctagactaggaagcaagttccagtgagagacccagtctcaaaagcaaggtggatggtaccggccttcacacacctgtgcacactgtgggcacctgaactcagacactcacatgtgcactcttacacacacacacacatacagaaagaagtaattatagaatttattttagtatgctacctagttgaaaatgaagtattggctaataaaattgaggtagaaaggtataatgcaagcttgatcaacatagaggctcctgtgtaacaacataatatacttttttgaagttgagatatagtgtaagttttctgttaaagggcgtgtcacttaaaaactgaatgtaagagccctgaagagatggcccagtggttaaaagcactagcgggaggtcatgcatttaatcccagcactcgggaggcagaggcaggtagatctcgagttcaaggtctgcctggtctacagagtgagttctaggacagccagggctacacagagaaaccctgtctcgacaaaacagacagaaagcatactagttgcttctgcagaggacctgggtttggtatccagcacccttctggcctcctcaggcaccaggcatgtaggtagtgttctttcatgaaggcaaagcacttaatataaaatgaaaaataattcttttaaaaatgttgatcagttgataaggcacagaattttgtatttcttccgagagtgacaactattaaacttttagaagatctttatgatactggtgtatgtaaccatatcttagagcttgaattttgtggtccatgagccataaaatgagtcacagggtagaagaaaacaattgcagatacagagctcagattttatggtccatgaaccataaaataagtcacagggtagaggaaaacagttgcagctctctgacaaaggacacacttgtgcttgtaaagagctgtttaaagtattattccccaggacaaaactaccacatgaagaattgacaaaggactctaaagacacttatggattgtggcactcagtggcagcagatgtgtagggagaagctagtgaaaggagagctaaaatcccagtgttgtgtgtccctgcacgttagagcagcagatcttgacagatgtcaccatcacatagtgctgcggacggaattgctctgaaatccacacacatccagagctacagcactgcagatgtcctttagaaagatggagtttctttaaaagtcaacctgcattaccctgtgacctagccatgccactcctaggtatttatctaatgcaaaggaaaatacttgtcttcatagacttgtatttgaatgttcatagtagccttactcagaggagcaccaaactcgaaactgtccagacgtccatctccagaaatggtcacaagctcaccatgtaatccctcagcaggagaaaggggtcttgtgctggtggatacacaggacagcacacacaagttctacatggaagaagccagacacatggtggatacacaggacagcacacacaagttctacatggaagaagccagacacatgatggatacacaggacagcacacacaagttctacatggaagaagccagacacatgatggatacacaggacagcacacacaagttctaaatggaagaagccagacacatgatggatacacagaacagcatacacaagttctacatggaagaagccagacacatgatggatacacaggacagcacacacaagttctacatggaagaagccagacacatgatggatacacagaacagcacacacaagttctacatggaagaagccagacacatgatggatacacagaacagcatacacaagttctacatggaagaagccagacacatgatggatacacagaacagcatacacaagttctacatggaagaagccagacacatgatggatacacagaacagcacacacaagttctacatggaagaagccagacacatgatggatacacagaacagcacacacaagttctacatggaagaagccagacacatgatggatacacagaacagcacacacaagttctacatggaagaagccagacacatgatggatacacagaacagcacacacaagttctacatggaagaagccagacacatgatggatacacagaacagcatacacaagttctaaatggaagaagccagacacatgatggatacacaggacagcacacacaagttctaaatggaagaagccagacacatgatggatcaatctttcatataaaattgtagaaaatgctgagttgtgaaaaaaaaaaaagtgacagtttccatggtccaggagaggaagtgggtgcagaggtatgcgagaaagtgcactagagtaacagaagtgtgccatcactgcagcgtgctccatggccgcgtccgtatggagcaggcggaactcatgggattatatgccttaaagaagtacaactcagcatatacaagtttcttaataatacagttgctttttaaagggaaaagtgtggcactcttctaataaaagtacacttttatttatagttttagcaatttatatagaacttctctaagtatttagtgatataacaaacatgaacacttgctatttctaaagcaagtcactctggaaaaatgaaacacgacacactcacatacagtaaatgacgtacgcatatttgcaaaaaggattctgagctgttttagctagtcttacttatatagctatgtaacttactgagattgaactattttgaaatctgaggatttttgtagttttataataaggtggaacttttcatgtttgagtaaaacaaattatttgactttagtgtcatctcatagattctgctcttcagttttacttcatgctaaggaattttttttctaggctatagttctctgttttcgactccacttcacaaaggacaatattacaaataacacagctgctgctacagtccgacaggtcgtgactgtcgtcttcgagaggatggtggctgaagatgaccgtcacagaggtaaaggctgacagctgtctcctttcgttgtgagtggttcccatgtgcaaggtctaactctcactcacttttacatttaccccggaaactagtgacacccaaagctggaacagtttaactgtcacacatgctggaaacccagcctcagcaggatcaggatcattagtttaagaccagcaagagaacagtcttaaagaatgttcaaaaaatacctgaaaactcatacacacgcatgtaaatgcacacattcatgtgtacagatatgtctgtgagtgtggtagatacaggtgtgtttatatatgggttaatttccttttcttttttgttaatttggtgaatttatccttccaggggatccagcgaggaaggtgtatggcaggggtggaaagtggccgcaaaccacaccgtggtcaggaaggagaggggagggaggagggagggagggagggagggctgtgttcaggaccctgcttacagcacaggtgcattatggcagctttcccaggtcactttaacctagcagctccctcacaggcatgcccaggagctcctgtccttgaaggtgattccaaaacttgtcacgttaacaatcagtagtaaccatggcagttatagtgcgagagtgtgtgtgtgtgtgtgtgtgtagtgtgagtgtgtgtgtgagtaagtgtgtgtgagtgtgagtaagtgtgtgtgagtgagtgtgtgtgagtgtgtgaatgagtgtgtgtgtgtatacacgtatgtaacacatacatacacatatacatgttacttaattcttagtttgagttttattgctcaaacaccttagccacagtaactcctataaaggacaacattgaactgggctggcttatagttcaggtttactccattatcttatggcagtaagcatggcagcgtgtaagcagacgtggtcctggaggaaccaagaggatatgcaggcagcaggagactgacacactggcataggctgagcatggaggcctcagagtctgcccccagagtgacacacttcctccaaaaaggccacacctcctaatactgccacatgctatggccaagtattcaaacacattagcgaataggggccattcttattcaaaccaccacactattgatgacaatttaaaaataaattattcagctggccatagtggcacctgcctttaatcccaggccttgggaggtagaggcaggtgggttttacaggttccaggaaagtcagagctacatacagagagatcctgtttcaaaaacccaagcaaacagacaaacaaatgattcactatcttatcactctgggtagatgtttcattttccatcttaagttttaacatgtgtatagaccacccccattgaggatgataatttcacaatttaataaaatattatattgcatatattttatgcaaacatatcctatgagtatttgtggggttcttttatctgttggcctatactgtgtggctgtgctctaatgcagtgagcagctcctgctaggccctgtggaccgctgggttgtagagctgccttgagtatctccacctgtgctttcagtggtcaccacggagagttcagttcccacgcatagctcctcgcgtgaatctctgcctacgtgcatcctacacctatcagaagttactggtgtatgttaacctttcacatcttattaaatactctgattatagtgaggtatttctttgtggtttaaaattattcttaagtcagaaacattcttttagagaattgacaggagtgaccttttttggattacaaatgatttttccacctgctgtggcaaagatcttaaggtgctgcagtcatgaacaacctggctttttttgtcaagcaagaaaaattgtgtgtatatgtatgtaatgtgtgtgtgtttatatataattttattatttattgtgtgttcaggtgtgtgcaggcaggcatagcacagcacaaacgtggaggttcatgtgcgtgccctccctgagttctatcccagggatggagtgcaggccagcttgcttggccacaggcacctttacctgtggagcatctacagccttgggcctgcttagctgcttttccctttacatagtggatctttgaagttggtgtgtatatgggatattgggaaatatggccgttgtgcatcctctaagaatgaccttgtctttcctgagctgaccgatgattaaagtttttgcgtttagattagctgttcttcactgttggtttgctagactgttcccactggtgttggaacatggtttccctgcagttccctctgaggacaagcacaaagacaatctcagtagccgtaagtgtcagggaaatactcagagtcgcattaagcacaggacagtttcctagtgcaaatgtcttatattcataaccttgatgtaattcctggagtagtattttcatccaaatttctctaaaggctagtataccatttgctgcttcctagtttaataatacagaaaaaattaccaagaacagttttcaattatttattaaatcaacactgattttaaaacaagctgctataatttacaaagaatatgtcctttaaaaaattattacactcgtatgtatgtgtgtgtgtgagcatgtgcacgtgtgcacacattcacatgcaggcacacaggcacacaggtggaggtcagaggacaactggcgagaattagtccttatcgtccaccatgtccatcctgggcctcaaactcagaccctcaggcttggtatcaggcacctttgctcaccagccttgtcaccagcccagagaatgggatcctccctactaatgtgaaaaagacaggggctgagcagggaaaaccgctctagctgattcttagctgatgcccccatgactggcagcaaccatggccgaccaaacagttaatccttctgaacgtggtaaagggcagaagaaatgactatatgtaaactttatgtttgatatttaatacagagtcagagatcatgtgataaaagctgaaaaataagaaactgggaaaatcaagtgtttaataaaaataataagcttgttaaagtgtatgtaagaaaatgagcaattgttattgtattttgtataaaaatatcttgtttgaagacatggttctttaaacaggaaccaaggttatgtaaaatattatgatgaattttaaacatagtatgtggtttgtaaaagggcatttgaacttcagtttctggcctgttttgcagatatagaacctccagtgccgatccaaggaaacagtaacagaaggtctgtcagcacgctgagaccctgtgctaaggacgcatacatgctcttccaggtacttcagctgacagaggaaccctactgtaacatacagcctgtgcaagtgttttattgcagaatttatgtctaatgtgattttaatccaaaaaattgcataaaattaaaagtattattttatattaaagtaattctaaaaggctgaaaaaaagatttccgcatctactgtatacctaactagcatgataaaatgttgggccacaccttacggaagcgaaactagactcagaactagagaaatgggtatattagggataacgagcattccttcagtgggaagaggttaagggacagattggctgtttactcagtgcaatctgatacacaaatgcctgcttctcacatcagttggcagactaaatcctttgaagtatagtaagactaaacgcttactccttattaaaatagcactaatacttgtctatagctgtctgttgtctgtagttacgtacgtcttttggggcttactaatctactgcgtgtacaatttgtcaaaagtggaatcgctaatgcttcatttttaagaaaaagaggtttgtttcgtttgttttataaactgggtcgtggaaagcgtacgttatcatattacatgacacttttttgtttaatttcgcaggacctctgtcagttggttaacgctgacgccccttactggctagtgggcatgacggaaatgactcggacatttggccttgagttgctagagtctgtcctcaatgattttccacaagtgtttttacaggtaagccaatagatattagtttgtcacaaaatagtttttcatagctatttgtcaagggatcagcatgtgtgtcctccatattagaagatgcggtgtgccttaggctttagagcggagcggcctggtctgaccgcttgtttgagagtgtgcggtttgcttttcgtggtggtttctgctcttctgtgatgacgctttacacgtgcagctgccctactctcctgaggaaggccataggaataaagaaagccgtcggtctaagtttgctttagtgttggtttttgtaattaccccccaacattttaaaactttattattagaataaatcttagaaacttatttaggcaaatttccccaagctacagagttaggaaagacatgtgaaaacacactgtttctttttcttttcttttttcagcatctgtggttgttttgtctgcatgtatgtctatgtaccacatgcattcagtgtccatggatgccagacgaggatgcctgatttctggagctgaagttacacatggtttttagccatcatgtgggtgctaggaaccaaacctgggtcctgtggaggagcagccaatgctcttaaccactgagccctctcgccagcaccaaaataagtcatttctgagcagaatccatgaaaaccattattactgcataattacgttctcaagttctcaaagtgatctgctagcacacattactcctatacccagcaacactgtctgttatacttaagggaaaggaaaaacctcctgtggttaaaaactaaagaaactcatgaccactaagccaccactaaggaagatacttgaagaaattcttcaagagtaatcatgctgaagtatggaatgaggaataggaaaatctaaatccttcaaaatcaataggaattaatgtgcaagtttcatttataactgtatagtaatggtctcaattctctaatcaaaaatagcacaagttgtgagactgagtttataccaaattttggaaaacagacaccgtgtctccctcattttttgtccataggatttcatagtcaggtaaaatcaggtgtgaatactgaatgaaagtggaagctgtgcagggagaaagaggagggtggagagcgtgggagcccagtggacttgagtgtgctctgcacacttaggaaggtgctttcctcacacagacagtgagagcgacaggtttcacaaatgtcctcaagcatagttttcatttggcaataaaagaaactgacacaaatattagaatcaaaatttcagtcactctcactatccctttttacacggaaagaattaacgcatacattaaaatatatgtgacgaaaccgtaagagcacacctgactgttagctcagatccaggagacgaggctagtgacggcagtttgctggttttgtttggttggttgtttttaatatttactgagcaaattaattaccgataacttgcttattttcctgtaacattaaattattaagttgggtgatttttttaaatgattctttcatggtcttaatgaaatctgaatggttaaaataataaaatatattggaagttaattattaagtacagacttaagccatatattgtcactaaagtgagactactcttttttgtttgtttgtttgtttgttgttttctctttacatcccagttgatgtcccccttcctggtcaccccctctcatagtccctcccccatctcatttcctcttttcctttaagagagtggaggccccctccaggtacccccacgctggcacatcaggttgatgcaaggctaggtgtatcctctcccactgaggccagacagggcagcccagcaaaagaacacatcccacactggcaacagctgttgggacaacccccactgcagttgttcgggacccacatgaaggtcaagctgcacatctgctacatatgtgcggggggggcctaggtccagcccatgtatgttctttggttggtggttcacactctgagagcccccaagggtccaggttagttgactctgttggtctttctgaggaattcttatctctttccccctactcttctataagagtcccaggcgccatctaatgtttggctgtggaattctgcatctgtttcagtcagctgctgggtagagccatgctaaactcctgtctgcaagcataacagagggttaatagtgccagggattggggcttgcccatgggatgggtctttagttattgcttggctattccctcagtctctgctccatctccatctcccccagctttacatttcttatagacaggacaaattttgcttcagaagttttgtgggtgggttggtgtccccatcgctccactggggttccttcctgcctggctccaggaggtaacctttttaggttcataccccattcttggagcctccccatccataggtctctgtatcccgaccccactccctcccccagctatagatttccattcattctcattaggatcaggtatggggagagacaggggagatggccagatggccagcagagtgagtgagactgctcttaactgacattaatggaaaactagcaagttaacgaagcctttcacctgacttatagtcactttaaataacattgtactattatttatggaattctcaacaagtaaaatgttatgcttgcttcttatggatgttatctccttgtggtctgttggagcaatcaaatagatattttcaagttagtctttaaatcatctttacatgagtaaaattatttttgtaaaataacttcagagaaatatatactttttgataaataataattattaattaaatgtttactcttattttaaatgctttataatcttgtgttaataacttaaatgctttataatcttattaataaacactaaaaattataaaatcatgtatgctctctttttaaaatatacattaattttttaaaacttcttgaaatatttttagtttgtgtttaatccatgtaagaacagcacatatttcaaacctctttgtaaaatatacaaagggcctcatgagacaatactactttcagattctaggagagggacaagcatcttacccaacagtgaaataacttacccaatgttatctggtttgaaaatactaattagatatgattgatagtgatgagtagtcttcactttagtgaaaatagaagcttaatctgcatttaatggtgaacttcaaatacatttattattttaatcattcagatttcaggtgatcagctagatcgattaaatagaaccagctcacacaaacaatgctagttaaaaatctttggaaaacaaacaagagacagtgaatgtggaaaagaaatgtgtaaggaatggggtgtgagatggatgggggaggggtgtagcaggcataggagagaagtaagaaaaagtagagagaaactggaatattttgtatttacattacaaagctgtcaaagaacaaaccttactaagaaaaagataaactcattaatttagatcctttatgataatctaattttttagaagtatcactacaaactcagtgatttttttttcctttgcaaatagcatcaagaattcagttttctcctcaaagaacgggtgtgtccgctcgtgatcaagctcttttctccaaacatcaagttcagacaaggctccagtacgtcatcctctccagcacccgttgaaaaaccatattttcctatttgcatgcgtttactgagagtggtgtctgttctgatcaagcagttttacagcctcttggtaagtgttcatttctgggcatgttttatatacattgcatgtattcttgtttctgacagaataccccagctgcggacttgaaggagggaaggcttactccttggctcatggtttcaaaggctttggtccttagacagctgattgtattacttcgggcctgagttaggtttgggggatgtcaccaaagccgcctatctcatggtagccggaagcagcagactgatcgtgcctgtggcagcaggcctcctcccttgccccttttattccacctgagttcccggcctttgttggagggctcacccgcatgcaaagtgaactgcccttcctattcatcaatcctctttgagaataccctcacacgtgtacccaaacgtggacctcatgaacgaacgctctaggtgttttcttaattcaatcaagttaacagtggaaatcaaacatcagttgtttttaaataaaatagatagatgtatatatgttatattatatgtgtatgtgtgtatataaaatatacatcttttatttatgtatgacagtgaagatgtattgatgctagtacagtttgcttttgtttccatgattcctgccaaggcatttactgttgtaatgctattgcttttatgctatcagatcaagtttcattacactgaaaataataaatcgtaatagtattattatgaaaattcgtttgacctcatacattccaataaactatcttgagcttatatgagacctcaaagcctgtctccataatgatacacttcctccaacaaggccacacctcctaatagtgccactccctgtgggcctagcattcaaacacatgagtctgtggggtacaaacctatttaaaccaccacattccactccttggcctccataggcttgtagccataacataatgcaaaaatacatccagctcaacttcaaaagtccccatagcccttaacagtctcaaacttgtttaaaaatccaaagtgcacagtctcttctgagactcatgcggtctcttaactgaatcctctataaaaagaaagatgcatattttccaccatcacatcttgtgcagtggcacaaggtacacattactgttccaaaccatcatagtgaggaaatactgggcaaaggcaagaccagaaaccagctggcaagctataaactctcaatctccatgtctgatgtcagtgctcttcagatctccaagtcctctcagcgttgttgactgcagcgcacttctttttttttttaagatttatttattttatttatatgaattcattgtagaagagggcatcagatctcattaccaatggttgtgggccaccatgtggttgctgggaatggaactcaggaccttcagaagagcagtgagtgctcttaacctgctgagccatctctgcagccctgtagcacacttctttctcttgggctgcttccacttccttttagcagctttccttggtagctaccccacgactctggcttctccaacatcacggggtctccaaggcaattgggcttcacctcgccagcttcccaaccgccctgtgggcctctgtgctgtggtacccccctccctgccctctaacacactcgtgcctggcctctgtggctttcctgagtcccagagggagatttttgtttgtttgtttgttttgttttgttttgttttttctgagacaggatttctctgtgtatccttggctgtcctggaactcactctttagaccaggctggccttgaactcagaaattcgcctttctctgcctcccaagtgctgggattaaaggcgtgcgccaccatgccctgcctgagggagattttataatccctttctaatgtccttgactcaattcccaggcagcagaaggagactgagtctctggccatagattgagtttatatgagatctcaaagcttgcctccatagtgacatacttctccaacaaggccatactgcctaataatgccactcgctatgagccagacattgaaacacatgagtctagttaagccaccataaaccaaactgcctctttgctttctagcatatgtgtggagtatcactgaaggtcagatcatacatttgttagcagtttgtagggctagagatggcaagatggtgtaccatggtttctacaaataaggatcgggaatgaacagcagaccattagtatctcaggcgtatagttagagagaagccatggttgtgttctgctgaactagttctgcattttattctagttactgtgaagatgatttaagattgttattatcatttcttttttgcttgaatgtttaaaaatctgtttttttttttaggtgactgagtgtgaaatatttctgtcacttctggtgaagtttctggattcagataagccacagtggcttcgagctgttgcagtggagtcgatacacaggctctgtgtgcagcctcagttactaaggtaagtcgcagcaggattctgctaaacagatagcccttatctgagctcagaagagcttagtgcctgtgtgtaagtattagtgctgcttcccaattaaattgtgtttatgtgcacgaagtcactgcagcgtgagctcaggaggacccgggagagctcagacacgtgggtagtgagccgtcatttactaagcaaatgaagccaacatttctttttcttttttgttttgttatgacctttgtcaaataaacctttgtttctaacccaaattagagaaaccactcaggcataaagaatgacaccaaatatggaattgtaaatactaggcaatattactggctaatattaaaatgtgaatattctaatacattaaaatgcttttctcagaaatgtttaaaattattttgcaggtcattttgtcagtcgtatgacatgaagcaacattccaccaaggttttccgagacattgtgaatgcactggggtcttttatccagtctctgtttcttgtccctcctactggaaatcctgccacagccaaccaagctggtaacgttgtcatcgtcatcatatttgtcttcactttctcccttggtttacaggagtcagtgttatgagagaagtttgtgctatacaaatttaaaccacctattgagagtaaaagtttatatttttataaaatataaattttgtaaaatatataaaatgatttgtatttttgtttattcctataactgtatgtgtttatatatgtgcaggcgcaggttttgtgtgtgtgtgtgtgtgtgtgtgtgtgtgtgtgtgtgactgggacctggggctcatttgttaggtgagctggatggctagcagggtgctgactctgcctccttctgcctccccagtgctaggattgcatgtgtgtattaccaagccagggttttgtgagtcctgaggagtgaaataagcactccttcatatgtccatcagtttgttcatgttgcaatttctctgtccagttgcatggtttcttcatttactgtgaggctgaggtaaaaataccttccaccattttctttaagacacacacacatcttagtgtactggagagcaaactcgagtcctcatgcctgagtgacaaaggctttaccaacagagctacctattcagggatccaactcagatcacaaggctttgcagcaatcaccttttatccccagagccttccacctctctagcccctcagatcatcttcaagttctggagatccttctccaaacgaaacagctcagggaggcccctcccttttttcttttccttcctattagtgatttttagagtctacaaattatggaaatggtttcctgtggttctttcattcttatattaaaaattaagtggttatttaaagaaaatagactctctgggtaaaacagagtcaacagatgtcatttgtaggtatcacacttgagagcgcagaatccttctctaagtctgagtaggcattgggatgtattggtttgtaatcagggagtaagctgttccgattgcttttcctcctttccttacaggaaacaataatgctggcggcccagcctcagcaccagctaactcgggggtggtgggcgtcggtgggggcgttactctgctgccagcctttgagtatcgaggagcctggatacccatcctgaccgttaccgttcaaggcagtgctaaagccacctagtaagtagcagcagcatggttttataacaaacaataccgtgaagatgatgcttaattctgaagtacttctgtctacattatatctaatatcgctaatacattttggagcttactttgttatattctgagaattttaagcagcactaaattttctacttgtagggttctaaatagcactataagcaaaatgccatttatttactggagttgtagttcagtgtgtggcttgaccctagacctcgtggacctagctcatctagaacagagttccctttggcaaattcaactttatttaacctaattaatcaatgagatggaagtggtcacgagctaaattctaggactttcttgtgtacaaatgtgtaattcttgtgtccacatgtgtaattcttgtgttcacatgtgtaattctgtgtccacatgtgtaattctgtgtccacatgtgtaattcttgtgtccacatgagttacagaagcattctgctggtcagtaagttgtctttttcttgctactgcccatggaacagagtggtttcaattttggtggagtcagtttacccatttttttaattgtgcttttggtgttatatctaacaaattgttgggagaagagacagaggcataaatcataggaagaaacataagcatacatgttaagggttttgtaattccttttatatgtaggtcactgatgcatttcaagttagttttgtgtgcaagagatagggctctgacatctccttttctttgtatgtgactacaacttacaactattacctttcattctttgctggtgaattcgtccatttatgttcttagcttgagtaatggccattttgggggctctagaaccgtagttcctcatttttcctaacttagcaggtaagagtttttgtctgctctctgaacacttgctccctcctgtgcagtggatttgaacttgacacacacatgcccctcagtgatgctgtactcaggtcacgtgtgccctgggtatctcagggttgtgctttctccgaggtgaaagcatcttcctctttgtgggtttattttatcttctctgtcactctaaaggtaagaggctgagaagtgccataatctatgttcgtgcattttctgttggtttttatatttctcgcaccaaagaatagtgaagatgtcacggaggccttaatttttctgatcatttttttttacattaaaaaaacacactgtgtgtgtgtgcacatgtatgtgtgctgtagcacatgtgtgaaggttagggtactgcttgcaggagtcagttccctcctccatcatgtgggtctggggatccaactcagatcacaaggctttgcagcaatcaccttttatccccagagccttccacctctctagcccctcagatcatcttcaagttctggagatccttctccaaacgaaacagctcagggaggcccctcccttttttctttccttcctattagtgatttttagagtctacaaattatgggaatgctttcctgtggttctttcctgtggcttctcattagtgcttgtatttctcgtgatttcagcctagagatgctggacaaagttgaacccccaactatcccagaaggctatgccatgtccgtggccttccactgtctgttggatcttgtccgtggaatcaccaccatgatagaaggagagttgggagaggtagaagcagagggtcccagtgtcacagagggagcctcttcacagtcgtcagaacggcgagacgagcaggcggcatccgacccgatggaccaggaaacaggtgtgctgtggctccctgcttgtcactgctgctactcttcagtcctttgaactttggggagaattgagggagtgtccctgatactgacacatcaccatgctgctcttacttcctcttgcttttgtacacacgtcgtcgctgtatttttttctgagctacttgagatgaagtctagacgtgctgtctcactgcagctgtctcactgcagctgtctcactgcagctgtctcactgcagctgtctcactgcagctgtcttactgcccctcgctcagtacctgcacctggttttctaaaagcagccatagtctccccgattctgatgcagtcatcagaagttaggatcaatctaggatttaatattaacctaggtcttattcgtatttaccatttgtcccagtgtttctccttgtggtccttgtttttgaatatactgctgtgtgaggatattttcctacaatgtggagcacagttcttcagctcttgttctatatgaccttgaccttgttagaaggatgtatcccgaggtagtttattcactctaagattaacacaggttattcctatgtttaactggctactagtttgatgtatcagtatgtgaggaagcaaaaatgccaggttttggagatgttcacttttgaatatacttggatttttattgaagtatacgcactggctgtgcttttttagtgtggtgctcttttcaggcccgatagtgttcttttgacatgtctcgtgtccctccgtccccttacaactcaacacaagatgctctcagtgagctcatgtttccagtccagtccaggtgttgatgagttttccaggaagcccaggtagatagagccgagactgacaaggacacctgtcacgtgtctggatttgaaatgtctgcttccttgtactaaaggccacgaagtcaccccaggttctctgcttgtagatcatttctgcaaggtcagttctaactttacagatttgtaaatctcatctccactgtgaggtgcccagtgcgatttgattcagtgtatttacttacgcttcattctcaacatatataatggtgttctagctgagcaaacctttagactctagtccacattaatttctacttgatcacacaggtagacagtttggctactgaaggaaatggaactggcattatgtacctttaaaaagatatttcttaactgcatagtggactatcatgttttaactctcatgttttaaaacaacttcaagacttttttttttttttattatggaactatcacagcttctgcattttcattatctgggtattgtacatattagtgtgtgatacctaataactgagttattgactcatagactgccagcttgctgtaatggtgtcacctggttaactgttatttttttagcagtgagcagagctgtttgggaagagatggtgagcgcttgctggtgtggccttctcgctgcgctctcgctcctcctcgacgccaggtactacgtctgagtctgtaagctttacattgtgtcattgcagttaaagccgacgctacagtaacttccccgtgtcccaggcatttatttcctatgcccagttttctgtgtgagtagaactttgacgttctttttcaattccatgtgcagtatgataacttgtgtgcacactgtcgtgagaagctggggtgattagcattgccgtctcctgctttctgtaagaacatcgtgtctctccccacacccacccccgagcctgagtttgctccgcactcccaccagagtagtcatgatgctttcatcagagatacagctttcaaactatggagcgctgtgtcatgtcaaggcttgccactgcctagcactgatgatcatttgcttgctatttctccccagaattagctgactttaagatgcttgatgccaggtgtggttcctgcctctaacccagcacttgggaggttggtgaagatggattggaatgagtttgaggccagcctgaataaacaccctgtctcgggaaacacagagaatgcttgatatttttagtttaatctttattccatccatgaattgtattacatgttataggtcaggctttagatatttgattacttgattaaacttccatcctaagtgcattgggtctagcttttcttgaaacctccctgagtgcatacgctgaatcttgttgtaaagcgtaactgaagtaagcggaaagctaaacagagcgcttgtcttccagcacagatgaggctgccaccgagaacattttgaaggctgaactgaccatggctgctctctgtggaagactgggccttgtgacctcgagagacgcctttataactgcaatatgcaaaggctccttgccgccacactatgctctgactgtgctgaacgccaccactgcggcgacactctccaataaatgtaagcactaagctgcacagcttcctccatctgctgggccagcagagaagggggtgggaactccacgttcaggctcctcccatcccgggcatggacggtgctccctccggcaggtgtgctcccgcctttccattttgtcctcttcaacacagtgcttttatctcctgaaagggaagagagaagatgagacttagggtcattggactctttgtttctctttcccatgtggccacatagaatatatctcttttcttctgctcatcccttaaaaaaaaatgtggagagattaaattgtaattgcaatgttaagtaatacttatatgttataaagatatgtgctataactatggccttccttgtaactatagtatgttgttggggtgatgactcctggttttctgtctggcctaatacaactgcaatatttccaccacttacattatactaatggtaaaaaactaattatcttggctaatactttgagaacgctaagatttattacatttaatttatatatatttcaatgtgatacccagatttcacactcaaaatttatttgcctataactagaaaagaaaacattgattcatgtttaaaatacttaatgtgttctagttctgttttgctcataaaacgggctactagcattttataattataacttacatggaaaattatttcacgtttgcttctgttattttttgcacctaggtgtcagatgtttacatacatctgaatggcagtactgctgttgaattggaagggttgaactgaactttattctgattcatcttttacaatataatagtaccttgacagaaatgtgagctctattctgcactgaggctttctgttgtgttctagcatattctatccagggccaaagtgttatgatgatcagcccgtccagcgagtctcaccagcaagttgtggccgtgggtcagcctcttgcagtgcagcctcaaggaacagtgatggtaatttgactagggtcggggttgttgtggttaccagttagtggtcagggcctctgttgtgctccagttttgtactttccaaatggtattactttctgagtttccttttcctgaacatagtaattatttattttcttgacatgattatagccagtatattaacttaactttctttgtgcatgcatgtgtgtatgcccattgctatgtatgtaagcacatgtgtagcagcaagtgtgcgtatatgtttgtgtgtagagaccagaggtcgtcgtctgccgtcttcctctatctgctgatgcacggtttctaactcactgaatctagagccccctgctagtctaggtggcccatctccatctccagatgctgggcttatagatgaatcaccgtgctctcccagcattaacatggattatggggatctgaacttcaaccctcacacctatgtggctttggcatccagctggtgggtaaactgaggcaggcagttgttgggggtcagtgcttagagccgctgatggcagtggatccagatacctacaggggctgatcccaatggcagcctgcaagtagagaagttattcagcagacctttctctgaaggaacagtagaacagtgggtgaaacaaaaggcaaagtccaataacttcatacactcaaatatttacatacacacatgcagacagacagacagacagacagacagatatattcacattcacacattgaatggttagaggaaagctccagcaagcagtacatatatacacccagttggtggatggagcaagctgcagcacacacccagacaagctttcgatatatgcacacatacacataggcgatgaatggagggaacagtgttccagctctccacactggtctttcttccatagcttgtacatcccagcaagatctttgaagcagtatagaatcacagtgcgttaccttttggttttcttctgataaatgattatgaaaacacagtgtgtcccctgcatctttacaagaaataacgttaagtagtacaggtaaagaaaacaaattatttccccaaacccacgtatattcatagctaagcaacttgttatagactaacaaagtgtaagtaagcaagggagttttctcagccagtttctcttactggcaggcagcaatttgcagttacaaagaaaggagtaattattttattatttatctttaaaagtagtcttgtaaaattcttgagtcacagatctaaaccttcatataaaaatcagtcatatctaccttaaatactcagaatgcatatttattcatcagcttatcttactaaatcatatcaggaagctgagggcaaacatgggtacaagaaatcaatcatcgccagtccagcctcagtgagagtcaggtcaccagtgctgccgttgtctcgtcccctgactataaaaggttaaataataagagtgtgcctttctgaacttgatatggttccctaagattttctacatcagagccagtaagtagcaaaaacatttcaacctagcttcactaacaactgtatttttccaaatgtcttctaaaggcagtagtcattgctgacaatctaagtatctaagttcttctctagggtggtgattgaaccattaactgccccagcagcagtgcctgagagaaagcaagcattagtactgtgagtgccagagtcacagcccagtgaggggctggagggccctttcaagttttcatacaattcttagattaagagggatgtgaaggcagcaagcagagcagaaccccataacagcatgaagtcctcaggacactggtcctcgggccgtgccacaccgaggctcatctctgtggctatggtaccaggtgggctgcatttcatgagttctaaagccatttgtcgttcctcctgcctgacccttggcaatgtggcaaacagtttcctcagcaaactgtcactccagccatagtaacacaactttgtgttttgtaaaaccacccaaacttcttttcctagtattcttgcttttcatttaagacagtctttgaatgcattcgtgctgatctgtgagctgttaatttttaagaatctatagaagttgctacaatctgtttcttttcgacatagctgacttccaaaaatattcagtgcatgaggactctgctgaacttggcccactgtcacggcgctgttcttggaacatcatggcaacttgttctggcaactcttcaggtatgctgcagtactggattctaggtgtatgactgctaacagttaaacaatgcctgctgcagtactggattctaggtgtatgactgctaacagttaaacaatgcctgctgcagtactggattctaggtgtatgactgctaacagttaaacaatgcctgctggccctttaggaaggcctaagagatagtatgaggcagagacatggcaagaagtaagcaagtgttagcaatgcgtcaggaagtaatggactgcttacagtgccataaactctactgctcatgctataattatttcatatgaatggtgctaattactttgctcctaattattaggatattactgtgtttagttttcattgtgagctattaccattgattttagttattagaatttttaaggttttatcttgttttaattttagcatcttgtgtggattctgggactaaagcctagtagtggtggtgccttgaagcctggcagagcagtagaagggcccagcacagtaagtggcagcccctgtagttggtgggggcttcctgaaatgtcacgcacactccacactgacgtcccccttcttctaggttctgacaacagcggtgatgacggacttgccagtgatctccaacatcctttctagactgtttgaaagctcacagtaagtccctgttgtaaactgacagctacactgttttgagctgtatatttgagatgaaattgtctttttcattttcattttaggtatcttgatgacgtatctttgcatcatttaataaatgcactttgttccttatctctagaagcaatggatatggcctatggaaataataaggtgtggtaatctacatttctttttagttatacaaggtatataagtcaccctagtgtttgatggtagggctggggctttggttgcagtggcctgtaggtaggtgtttagcgcttgtagcaggagtaaagacggcacggtgtagctgctgatttgtccatgtgtgtagtaggtttaaagttatgtcccttctttcttacatgcaacacggcttttatacggagctgtcacaaactatcttgacagtgcttgccaggaccacttacgatgcaggaaacacaagactgcagttaggacgtgggctgtagattttggtggtgggtttgccctcattggagtggaaaatcagaaactaatcatttcttctggagataatgattctcctcaccttaaaattaaacattttcattgtctactaattgagtaaatagaacaagactctgtccttcctgctaggtaaggatagactaggacttctgcatattagcattcaagagcatttctttctgtactcagaatattttctattaaatttgtaaagcacaggaaaaattgaacttaaccatattttagaaattgctatttgaaatgaaatgtttgaggctaacagcattgagtggtaaagcacttgccaacattgtaggaggccttgggtttgattcaatcacagcaaaaatatatacagaaaaaaaaaattgttaggtgagagagcaactcacagtgctcatctgattgtcctgaggtcctagctctatataaaaatggaatggaaccctttatacctgtgtgagtgtgtgtgagagtgtgtgagagtgtgtgtgtgtgtgtgtgtgtgtgtgtgtgtgtgtacacgcatgcacgtgcgcacgcgccctatgcccttgcaggccaggagatgtaagatcccctggaattataggtagtataagccaccaatgtgggctctaggaactaaacttcaatcctctgcaggagcaaccagcactcttaaccaatgagccatctctctagccccctctctacatttaaaaataagcatagtctgatcacttcccaatatgaagataagccagtggcacatgcctttaattctagcactcaggaggcagaggcaggttcaaggccagcctgctctacagagtgagttacaggacagccagggatacacagagaaaccctgtcttgtcttgaaaaaacaaacaaacaaaaaagttgttaaaatatcttctctaaaaaaatcttcagcgaggtcaacctggtctacagagtgagttccaggacagtcagggctacacagagaaaccctgtctcgaaaaaccaaaaaaaaaaaaaaaaaaaaatcttcatgtatgaatctagaacatgtatatgttctttgaaatgctacagatcattatgatgtacaccctattaaatgagaaggacagagaagtgctgatcctagggagccattcctcggggagacttactttctgacacaatctaattgtatagtaatatctccattttatacattaaaatttcactagatactgtaatttatgtaagttatgtagctactcagtggtctagtcaagatgagataccaggaagtttgtaggcatcagtcttaaacttgtaccttacttatccataaatagcaattttctaccccaaccctcagggcatctataggttagaccatgccacacttgtcttgaatcccaggtgtaacttgcattaggaaaggaaaagatactgttaaacattcccatgttgcaaatgttttcttttttaaaatttttattttcaacaccataaaaacattaagaatgcagaatttttaaaaaaaacttagatttgtaggtctctaagatctgtaacttagtcgcttctctgccagtatactttggtggtaactttaggagttgatttagagtctcagaaagatttgtctcatgataatagggtctactgtatttcctgctaactttacatgtacaaaccaatcataatttaatcattgtagtgttgtattttattattagccatcacagaattctcttcaatgtatcaaagtaatatgtttcctccttaggagccatctctctttgctgttgccaaactattagaaactggtcttgttaatatgcacaggatagagattttatggagacctctgactggccatctacttgaggtgaagtgtcttgcttaaatactatcattgtttactgataaaatcatgtccactgatcttatgatccagcataatgacatgttagccgacctccttcctcacgcagtgtattttatcagaggactatagttgtgctgtgcttagcttggggaagggtgaatcttgtaaacaatgggtaagtgttttccttgtaaaatggcagtgctgtcagctgtgtgttagcatctgcttccttccatcacagtctcctgctcccctccatttcaggtagttctgaagttttgaagcaatttgggatgagagtgagttacaaataacttgttcacaagtttgctgctgtggaggtagcaggagaggagagggctgttgcgctgatactaggtcacagacagtgagtgaggatctgatggagagacacgcccagatagtgagctggcgcttaactccagcggcttgtgtgtgctcggggaccatgatcatttcatgtcaccttcgaagcctgagaacaatgctgtccttcttcctaagattttactcattttattgggattaaatttaccaacgaaggatgttactaatatatgagattgttttatgacttagccagcttaagtgcgactgagctgagcatagtgctgtgtaaactgagcttgccttatcgagggctgagcccttgggccaatgggaaagaggaacagctgacacccttagggtcagctcactgtgctcctatgacatgctctctccttcctttcctgtgacttgttctggtttcatcttgtctttgttttttctctcttgcttcccttgcctttattcagaaggtaagcgcacagaaaatatttaggtataatttttcttttactctttactgaatacatgatgtttttctgttctcgggttaatgtgtatttctcaccttatgtatgcaattgaatgaagtttgttgggtgtgtgtctctcaggtctgccagcatccaaactctcggatgcgggagtggggagcagaagctttgacgtcactcattagagcggggctgacgttcagccatgagcctccacttccacagaaccaggtaaaagtgctgtttgcaggccactgcagctgcagttctatgttaacgtcacctcgtgacactctagcattacctttctttcatgagactgtcttaatgtagcgcaggcaggccttagtttataggcaaggatgaccgtgaattcttgggcctcctgccctcccctttcaagtgctgggattttaggatgtatgctccaagccaatgtctaaaacagaatccttaaacttaatactctgttttacatgtcgggtacggatcactcggagttttatggcggtcttcataaaagagtctagatgatgctgaattaagttactgcagctctggacctccctctcactacccagggacaaagcatgtgttgcagcagcaagcacgtgaagttggggtcacactgcgtgtcttcctctaccacggctcagtttactttctgtagatcaggctggccttgaactcacagcttttgcctcccgagcacttgcttggataaaaggcgcgcaccaccaggcagggcttgcttcactcttgagacaatctctcggtgaatctggagctccccaaaggagcgggactgctccacccacaggctcagtgagcaccggggctgaggacggttgctgtgctgctgctgtgctgctgcctgccttcttatgtaggtctggactcagtgctcaggcttactcggcaaggccccagctccaataaaagagacttcatccataaatctttttgtcactttatactggcagaatttttgccattcatacgtaatttacagtggagtgtttgtttgtttttaagttcactgacgtttcagggtttcaacactgagtaaactgaagtatctgtcggccatcaccagtccccttaccatctcattgtctgctagctgtattctacacatgacttcagcacaccattgttgactgtcacctttagaacaggacaggatggttggcaggacagagagacctctgctcttgtggagcttgcttcttagtgatttccttttcctctgctatagcttaaagggcctgttttgcttgtttcttcttcttcttcttcttcttcttcttcttcttcttcttcttcttcttcttcttcttcttcttcttcttcttcttcttcttcttcttcttcttcttcgtttgtttgtttcttcttttggttagtgctagggactgaaccccaaggccttgcatgtgctaagctgttagcaccctaacactcaggacacccactgctcttgatgtttaaagacaggatctttctgtagagtcctggctggcttcagactttcagtcctcctgcctttgcctcctgagtactgaaactgtgaacatatgtcactaaacctggtagctctagttgaaggctttaaaaaaatataaagtcatcactgacaaaatggctcagtgggcaaaggtgattgtcgtcaattctgacaacctgagttcaattcccaggacttgcatgccgcaagagagagctgactcctgcgagctgttctccgacgtgcacacgtatgatatggtacatactcataaacactaagtcagtagtgataaaaagacagtcagactccttttctacttgcttcaatttcctcaatgtctgatcaatgttcattgcatggtaaacacttactaaatatgtgttcagtaaatcagccacaaagaacaaagtttggagagaagaaaattaaatagtgaagtgtttttaagatgtcaaaagaggtaacacagagtactttttgtctcagcaaattttgtggcttttgtcatttatgttaataattgctattaaagcatgtaatttcagactttatagttagatcttttgtatcatacttggtaattttacatttaaatacatgctatacattaatacagtaaatgaaagataatactagatattgggaattgttttctttaagtgtagctaaggctatatttcctttagcaaggtctatggggagaggtagccccacatttcccctgaaattgtactgaaggaaagcagaggagtggcaaaactctaaagatcactgctagagaaatcatattctgttcttttactagaaaatttctgtttactgcagtattgtgaatggaggtgaacctgaacctcacaggaacagcagagacgggtgctacactctgtagtcacagcacttgggaaactgaggcacaagatcacttgagctcaagtccaactgggcagcatagagaaggcattgcagaaagatgcggtggggggtggggtggtggtggagggggacaagggactggcagttgtaacaaggctacctgcggtgttttggacgtctttgcctaattaccttcttgttccctttttagagactacagctgcttttattgaacccattaaaagagatgtccaatattaaccatccagatattcgactcaagcaattagaatgtgtgttgcagattctgcaaagccagggagacagtcttgggcctgggtggccgttagttcttggagtcatgggagcaatcagaaatgatcaagggtaagtgtttaaaatggatacgcaacgtgtaagaggtcagaagggtgccatcctgatggcctgcagtgagaatttttatctctgccctgctgctcatgccctagctctccctgtcacagtgcttcataacctacccaggcagttctgggaactcgcaagtattgttttgcttttaaaggtatagaagatttgctgtttcgtgccatttatattagaatataagatcttattataagataaataatttaacattttataatgcatctaaggactccatatattaggaaattcttaagaaattgctttaaaatgactatttgtttcttaaacatttattctgtgcttactgtattcccagaactgagcttgtgggctcttccgagtacacaaataaatggccactcccctaaaaggggaatacagggaagaaagcactttactgtaagccaggcaaagctccagtggaaggggtggagccagagcatacggcatcctgtgtgtctaaaggctgtttgcatttactttgagtatgcttgagagggaagtgaggagtttacacgggaaagttgtagtcagatgtgcatttgacagagtccactgtgacaagggcacggagagagagcagcaagtgtgggcgtgtgacaggtgcttcctagaagtgacaggtgtttgaggtatgtaacagattgactggggacaaagggagacgtgcagtctagaatgattctcacacttagggcataggtgaatagtcaaatcccattaaataaagagggatccagaaggaagagcacagtagaatgggatgtggggttttacttaacttagggcagaacattagtgaagaaattaaacaggtcctgggtattcgtgtctgagatcacactgtcacacacactctagtgacaggggcactgcagtgttatattaaaactacagagacaattaatgatagtattagagaaattaaatgtttaagtatttgtaatagtaaatgtccttatagtccagcattctgagattattaaagtcaaaaagaccaatcaatgtgcatcaagttgaaactgatttccttaactcacaccacagagtagaacgtgtgctgtaaagtggcagggacccatgtgcatccagggctgagaaactctgcaacattgaagactcgattatttacgttacttaccatttgttccaggctacgttcagtggctatgataaacaccatggcctaaagaaacttgagttactgggcttacacgtcacagtcagagtccaccatgaagagaagccaaggcaggaactgccccagaacccgtggggacactgcttactggcctgctgtccatagactgctgagtaggctttctcctacagcccaggaccacctgtccaggggtgacacaggccatagtgcacagggtcctcccgcatcagtcacctgcaggccagtgatggagatagtccctcaattacagttctctcctgagatgactctagtctgtcaggtggactgaagaaccagccagaacaccaccaaactttttctccaagaccatctgcctcttgtgaaatttatactgtacttttctcacagaacggatctgtaattgtgcttaggtacttttaagaggtactgtgtagatattaaaaacagcagcagcagaggcacttaccctcggctactgagtaagcacacttgtgcatgtgctgggccacagaagaaagctttggtgcatgagggagaaaggggctgtgacagcctcccctctgcgctgtcacaggggtcctgggtcgttggttggtgctcagtgctaacactgatttccccatctctgcttcccaaatgtcaggattgaatctaatcttatttgttaatctcatcaaggtccctttactcttgtttatttgagaaagcatatgtaattatgtggctgttgaggtactgtgcaaccagggagggcatccctgttaaaattctaaaataaaagtttgctgggttcagattattgtaaagttttcctacccctttcttttaaattcatatttcccgtttcttttgttttcagagaatcattaataagaactgcctttcagtgtcttcagttggttgtgacagattttctacccacaatgccttgttcttgcctacagatagttgtagatgttgcaggtagctttggactgcataaccaagaacttaatattagcttaacgtcaataggcttattggtaagtactattgcctttttatgataagatccttttaaaatgatttatgcagttaacagtgaatgcttacaaatatagggtagacacttgaaatttttactgacttttaagtaccaagcatatcctccatgaattagtaaataatttcggaaacagtctgttagtagtgggacatttgaaacaattttgatattactgacctttgaagtttgagttttgctgagtttatgagagtacttcgtgaaacaataatagtaaatgcatataaagaaaatcatgggctggagagatggctcagtggttaagagcactgattattcttccagaggtcctgagttcaaaccccagcaaccacatggtggctcacaaccatctgtagtgggatctgagtcctcttctggtgtgtctgaagacagtgatggtgtactcatatacataaaataaataaatcttataaaaaatcatgattgatgtagtgtacaggttaagtgaccttaaatattactttcataacattttttcatagactatttaataacaaagctttatttactatttgtatagacccatagtctgtcaacaaaactgttagacacaggagacagcatgttgtagtggaaggctctgtgtatgttagcacttgtggattcttgaattatggacatttaaatctcatttcacatatcttgagtatggaattagtatgttagcgtattgcaagtgtttcatatgaatcagatatgaagagaactgcccccagtgtctgtagtttatctaaggaaattgtttagattctctgacctcatgttacagttgcgagagtgtgtaaagctgaacttatgtttctctcccaagttagttaagtagtttatttaggatctcctaaatgtttattgtgactcagagattccataaagttgaactttaaatttctcacacaaagtagttaacttggtatttttctatgaaaattatggccatggaagactactcagtcagaccctccctgctgacaaagagcagagcagctgactgactgtgcgctctaacagcactcagtgccttccctcacttcctgtggatggtcacagctctgtcgtcattaactcacatacttcactactgctgagaatatagtctgtgttatgtgaagataagaactggtttttgtatgatattataagttattaagtgatacaattatgttgtgatgctattgttttagttaagatcttaatgtatatcgtatagctaagaattataatgacaaaaaagaattctaatgactagatgctatatatatatcaacacattgaaattaatgatttctttctacttacacttgaagttttcataataaaaagtacaggacaatgaaagttagtgataaggcaaaataattcgccaccttttctttaaattagaggcgctgatgagggaaatgcttgtattgaatctcttctgaagcttagaacaaaattcgtgaataaaattatatttctatacttttctttttagtggaatatatcagattattttttccaaagaggggaaacgattgaaaaagaattaaataaagaagaggcagctcagcagaagcaggccgaggagaaaggagtgtctctgaaccggccgttccaccccgcgccaccgttcgactgcttgtggctctgcctctatgccaagctgggggagctttgtgtggacccccgccctgccgtgaggaagagcgcagggcagaccctgttctccacgatcggagcgcacgggaccctgctgcagcactccacctggcacaccgttatttggaaggtactggggacggtggggctgctcgttttccgctttcagtcacatgtgtacactttctaaacagtcattcctaggcgcttgtttattttatgtatatgagtacactgtagctgttttcagacacaccagaagagggcatcagattccattacagatggctgtgagccaccatgtggttgctgggaactgaactcaggacctctggaagagcagtcagtgctcctaaccactgagccatctcaccagcccaaacaaataaatttttaaagattgattttcattatttttactgtgtgtgtgtgtgtatatgcatgtggacgcatgagtgtgtgtgtgtgtgtgtgtgtgtgtgtgtgtgtgtgtgagagagagagagagagagagagagagagagagagatgcacacaagagcagaggtacccacagaagctagacgtttttaatctccattcactagtccattctctttctccctgagagggtcactagttccttaatgctgcaagtaaaaccaccaccacagttaccactgcttcaacttcctgcttttcctcctcctcttcctcctccgatttctctttcctctcctatactcaactgtccttctttccttctttctctttttgtgtctgtgctgggtcttgaacccaggaccttgtgcctaaactattagttcatctgtctgtgacattttctatttcgtaaacatatctactctgttcagtgctcctcccccatttgttcttattttcctttaagtgtaaaaactctccaagttgtaactaagttttgcttgttggttggttttctcaacacctcatttggtcctgaggtctggacatcccgtggtaatccgttctgcctggattcttgtctcaggtataatcgcagagatgtttccactgataacaagtcctggctgtgcgctatctgttagtttacttttctaattccgtgaacttaaggataagtttaagaatacacagttgccttttctagtcaattcctctaatttatgtggattaataaaactgttacatatttttataacttttattttctattgctatatcttaagctaactcatcaatatttttatatgatttttaaaataaatatttaggtactctttcatctactggaccgagttcgagaatcttctacaactgcagacaaagaaaagattgagtctggaggtggaaatattttaattcatcactcaagagacacggcagagaagcagtgggctgagacctgggtattgacattggctggagtagcacggatcttcaacaccaggagatacttgctgcagcctctaggtgtgcaatattgtctttctctgcttatacaactaatctgtgttaaaggaaagttggaacacacttaggaaactctttgggaattgatatattgtactagaatagtcagcagtcttaactgtaggccttacttgatgtggtgtacatgctcgtttcatcgaggggaagaacctgccctggacgcacctttcagagtccagtggtgaagagacacacacacacacggctggacttgagagaagagccgtgattatgcccttaagcccacagtgactgcatcatgtggtttccacagtgactgcatcatgtggttgctgggaatgaaggttgctcgctagggttggccttgcactccggcctaaagttttattattatatctaagtacactgtagctgtcttcagatgcaccagaagagggcgtcagatatcattaaggatggttgtgagccatcatgtggttgctggggtttgaactcaggaccttaggaagggcagtcagtgatcttaaccactgagccatctctccaacccgggatgtggtatttttaattatcatatttattatgtatgggagggcatgtgtgggcattctgcctcgcatgagtggtggaagtggaggttggcttgagggaattgggaagccacactgtgtagctgtcctgactgcacctgatgtctcactgtaggagtgtctggattgtagaggcaggctacccatcaggcattgtggttctgtggatgaggctcagttgtgagtcttgtgtggcaagtgccttctgctcagccattgtgccagcccatgggtcatagttttagtatgttagttcctaattttattcttttgacttctatgtcaatgtaagcagaagataaagcaactatgcttcaaagtatctgagaggatttgctcattgaatactaattgactccccccccttcattgatacaggagacttctcaagagcttgggatgttcttcttgaccacatccagtcagctgcactcagtaaaaacaatgaagtgtccctggccgctctgaaaagcttccaggagatattacagattgtgtcccctgtccgagactcagagaagcccgagccccctgccgttagcgtgcccgtacccgtccttctaggaaacctttccggcccaggcctgagcaggccgtttgtgaggacagactccattggagaaaagcttggcagatgcggctcggagacgcctgtggtgactgacgagctggaagatctgaagctctggtgggctgcctggaacacctggcacaggactggatctgaaagcacagagccgcccagctccgtcgatgagctgacctttatccccagccagcctttccttacagccttagttcagatcttccctgccctctaccagcacataaaagctggcttcagcatggccgacttgcagaagctgggcgtcatcctgcacagcgctgtctctgtccccatcagttctgacgcctctcctttcatccttccgtcttacacggaagcagtcctgacaagtttacaggaagctgtgcttacggccttagacgttctccagaaggtaatgtgatttcagtgcttgcctaaaagctgtaaggaataggattctttggatttttattttattgttttgtggtaaatttcagaagataaatttaggactttctgagattgctatgtatgtacactttgggataaatttaagattgtcaagatttttaaaacttattcttgagatagttaaaaaagtaactcaggtctgttttgagttgttaagaagctgcttgtcgggcggtggtggtgcacgcctttaatcccagcactcgggaggcagaggcagatggatttctgagttcgaggccagcctggtctacaaagtgagttccaggacagccagggctacacagagaaaccctgtctcaaaaaacccatataaaaaaaaaaaaaaaaaaaaagtaaaatgccttcatgggctggagagatggctcagcggttaagatcaccaactgctcttccaaagtcctgagttcaaatcccagcaaccacatggtggctcacaaccatctgtaatgagatctgacgcccttttctggtgcatctgaaggcagctacagtgtacttaggtaaaataataataaatagatcttaaaagaaagagagaaagaaaggaaggaaggaagaaagaaaagaaagagaaagaaagaaagaaagaaagaaagaaagaaagaaagaaaggaaggaaggaaaaagaaagaaagaaagaaagaaaggaaggaaggaaggaaggaaggaaggaagaaaagaagctgcttgtggccgctacctcgctacctctagtcaaagttaattctgaactgtgggtagcctatgccaagacacaagggtgagctggaaaaagtggctttcttactgcagatttaaattctgtatttttagctgtgtgtcttgtttttttacaacaaatcaataaatagatatgaaaaatagtgaataaatccagactgggaagcaagaccatatcaaaataaaagcatttttttagattatccaggaaattgctacctcagttcataacaatcaagatcctaaacaagggctaacaggatggctaagcaggtaaaggagcttgccgccaagccgtattatggtccctaggacccacatggcaggagaacttccaaaagttgtgccctccacacacattacaaggtatgaacatatacatgtataaatgtgctaagaaaaagaagaaaagaaaagttatattcccagcacttggaaatctgctacaggaaggtttgcatgaagtttgaacccacccttgattacaatgtgagactatgtcaggaagcaaacattaacagaaaaggccaactcagtaatcagccaagacgtgagagagtcatggtctgtcatcaaggctcatttgtaaggagacagtcctactctctagtcctggctcctttattccctggacatgaccacagcacccctacactgccctgaaggcaggcagactaagcaatagtctttatctatttaaccatagttccattgttcaggaaacaaattgtgactaagatgagaaattaacacaatctgacattcaatactgtttgagggacatgaatttctatgactcaaagtaagtttgtagttcatcatccttgtgttaggattttattgctgtgaatggacagcatgaccaagacaactcatattaaggacatcatttagttggacctggttcatagatgttcactccattgtcatccaggcaggatgtatggcagcttacaggcaggcatcacaggagtactctacatcttgatccacaggcagccaggaggagactgccatccacgctggcctaacttgagatacatatgacacctcaaagccctctttccacagtgacacacttcctccaacaaggccacacctcctaatagtgctactcatgggccaagcattcaaacacatgagtgtgtggggaccaagcctattcagaccacagtactttccctctgactagatcacacagctacattgcttatgcctttccctgaagtgaatgaaaaagggtttctatcagaaaaatgttgtcatttggagaattcccaaattcttggactcccttaactgcacattcagggctgttatatatgcatagaaggtaataaaaaacagcacacaccctttaaattcaaggaaaaccatgaaagtttacttttgaataactgctttagcagaaaaagaacaaatacaattattcattgtggctactgggaatttatctgagctttgactctgaacacaaaatgtaatgtcattccaaacctgaaaacttattcctgtcactagaagcattctgcgtaattgtttcaaagatgtatttatgtttcagctctaatgcctgtgagtatgtagaccgggtgtggggcaaaaatcagctgttatgtccatgagcttacagcattagagagaagtcagcttcatcttgacccactgctggtctttgtagcaaatgtcagatgcacaccccagtctcacctacttgtcataccaggcttgaactttcccctctgtgttagagagtaagtatgagttcactaagagcatctttaacctgactaaacagtgtgaggctgccttttgtttagtgactgtttagaaagcttgagttcccagtatgaaaagacggcagagcacatgggattctcaagggtctgggtgagcaaatgcatccacagggaggaatgcatcctaatgttcacactttgcttcccaggccatctgtgttggaccagaaaacatgcagatcatgtacccggctatatttgaccagttgctggcgttcgtagagttttcctgtaaacctccacagtatggacagctggaaacaaagcacattgcaaatgccaagtacaaccaggtagctcgcaaactgtgtctgttctgtagtaagttctagatgagttccagtccagatagactgtggttacctaaggaagcgctcctctgtgctcaggtgtcccttacagaacacaagtgttacccgagacatcgctctctctctccagagggtccttctcagaggtcgccctgccctgcgctcccttctttcctcagaagtgagagctcctttccaccctttctctttgcagccccattcttctacaaattgggtataaacccctaggcctggtcttacctttaaatagatatctacaatgcaagatgaagaaatctgtgtgtactaaacaagttgtccattgctggtgtgaaatttagttggattttacatccatcccatcgccttagctggcagattatacctttggctaatttataacaagagtagatttttgaacgcacgcactgctgattttcttcactcaacataagagttataatttatagagtccgaaaagtagttctaatgtgtattaatttttctcattctatttgtcttgcatcacaatggaatcacaatagatccaactatttgcaccggtgagttaaatttcctaaccctgtcctaatctgctgccaacacagtgcatctccccagtcttcatagagggctctgtgctttcccggtagctggaacttttgcctgaatgagaattcttttttatgacgtgcatttgtttttttgaaaactttgcatgtaatgtgatctgatgtagaaccaaggcctgaacttgtaaggaaaaagagcttccttctcaaaaacagtatcatttccttcagacccttcccctctaactccatgtgaaaatattactttctaggcggaatgggtagccttgaattatgtaccgtttgctgaaagatctttagaagtagttgtggatttgtatcaaaaaacggcttgtcataaagcagtggtgaatgagaaagtcctccagaatattattaaggtaatgtatcttcttatctctataattttacatggtattatacaattattgaaatttctctaggcagtatattgggataaatgaataaaacatttgctatttatagtgacttcaaatacatggattgtatttggcaagcatattttttattatatgggatgttttggagtggagtgagggtacttcagtagtagggcttgaacctctgaaatgccaggaaatgcttttctgctgaattctacctctagtctggcaaggtcaatgtgatatagtccttaaaagagtccttaagtcttacgggagctcagaactcagagggagtcagtttgtctgcttagctgttgatgaagacttgtcttgagaggccatatgcagaacaccacatttgggtttctctttaaagattaaacatttgttcactatgtttctccttatttcttcactttccctctgtttgaaggacaatctaaagctaaactccttttctaggtttcctattcttgcatgattaatttattgcagtattagaaaaagcacattgaaacatttgagtaaagtgtaaaactcaaggaattttagttctcaaacatgaaagtatctcaggttgttccctctcccctggccactgggaacacataggcagcattggcctcttttgggcaggcaggagacctttagggactatgctttctgctgggagagccacagcaggatagttgcaaactggtacattttctgttcctaactctttgtaatagtatccttattgtgattttaaagaaagagaactgaggttcaagaagtagttaatgactcgtgcttagatgagaccgtggtaaagctcatggctgccgcacagtacttgggaggctgagacaggaggatagtgatttgagtacagcctgaactacattagtaagactgtccaattaaaaacacacatatgctgcttttagagctgaggttagctcagtggtactggtcattcttggcatacagaaggccctgggtctagttctcaattccaaacaaaacgaagtatgtctgtccaggagcgtcagtctttcttgaccgtctttcagtgaaaatcttcatgctgtgctttcatggatttacctgacttttagttttgaatgtcgctgtgtggattttaaccaaactgaactttctctccagactctcagggttcctctcagtttgaagtattcatgcccttctgaaagcacgtggaaactggcggtagcctctctcctcaaagtcctgtccatcggactgcccgttgcccgacagcatgcttcctcggggaaatttgacagcatgtggccagagttagccagcacgcttgaagactttctctttactaaaaggtcaggtcattggtctaaaatggagcgagagcctttaaggagatgggagactatgtctgcaactgtgcagatgggggtcttactctctctccactgacagtcactgactgctgggctgcacacacaactggaaggatgtgtctgtgccttaggtactttgtcactgtggtgggaagactagtgcttgatgcaggggacctggtgctcagtgtatttttacatttaaagtgtacaaataaaacaaggcctgctaaccatctagctgtaggcatatgtatactacacctctaaactaaatgcattgatgctattttatacatataacataaaagaaaattatagagacttagatgtcagataaggaaggttcctattggagccttgcgcttactggggattgcttgcagatgcgttcttaggcatgcacagctttggtcttctcttctgttgacgaggatgatactgcttagttcttggggctgcagtgaggacacatgcgagtaatgcagacaaagctcttacaaacactggctgattccagcaacagttaatacttaagctgctcttaaacagtgaatacttcaatatcctactcatttgtgattatcttactatccatgcatcagaaagtctagactcccttgactctctcagaactattgactatctgttcttgctgtaaccactttgctttagaaaattaaattgggcctttcctttatgcatgttctcttatgtttactctaaggaatttaatgtattgtcttacaaaataataatgggcttggttgagggtcatttctgtcactatcagatagcataaataaaatcagatgtcctctcaatggtgactcaggggtggggggcacctttcttactcacactccactgggagaagtttagttttacagatgttcagctcaagattgctccgagtatttaacagatcatttacaggaagtactgtaatttagcagcggcttcttttgagtgagccgtaatgtctcagcctgagcaggaagagctaatgttttatcacttgagtactgcttatctccaggttgtccagaaaatgaaatcaagtctttcttttttctttttagcatacctccagataatctctctattcaagaatttcaaagaaatgaaagtattgatgttgaagtaagcaagcttagaaaattttttctgtgttttatactgtatttgaggatgataaatggaatgtaaagattttaatgttagtagggaagggcatgtgtgtgtgtctctctctctctctgtgtgtgtgtgtgtgtgtgtatacctgtatgtgtgtcagaggacagctttgcggaaccttccactttttcatgggttcagcacctgctgagctgtcttgccagccttgaggggttttagctgtgaagctttggttggggaaggaggtgggatctgttatctttgaggtagctgaatgtttacgtaaatcaaatacattattttctcatgtagacttgaaagtgtagccattgtaaaagtctcgcctatgtgccattgctgtttaagcctcatgtaagcttttttttttcctttagaggataaaataaactgtatgttaggacacagtatgcaacaaaaatgaatatgactttaatttctcatagttcataatttctggttatgaaaaataagtttaacgttaattttggatatttaaatgtgggtgagtctcaaatatggctgagcatttttctatatatttgtggttgggtgaagatcaacatatgttcaaactgtagcacagtaaaccttagtgttgactctccttataggtaagatggatgaagaggcaggctagtggtcatgttgtaggaacagtaaaacgttcatgtactgcggtcagagaagggtcgttactttttcaaaaagtaaaatttagctctgactctagacaatctcatttgaatcggccgtctcttccgaaggaaaagtagatttggcgctctctcctttgctgtaggttgttcagctcatcagtgcggagatcctcccgtatgccaacctcattcctaaagcgttcgtgggtcagatgatgaccatgctcaacaagggctccatccactctcagccgtgctcattcacaggtgcgtgactcggggccgcttacagcccgagcgaggatagtcacatgtgtaagtcatgcttcagcgtgggacgtagagagtgagggttataccgggaaatggaggcgatcatatacgtaagctctgattaagtgagtcacatggggcttctgcagtcggatgaattatgcatggtgacagaatttactacattttgaagtcatggattattgtaaagagtctagtatagaaaaaaagagaatattctgccacttagaatgttggttttagtagggaaaaagtttcttaacatttcttaacggagcaaacagtgagtgcctactatgtaccacactgtgctagagaggtgtctcactcttgggaacatttctgaggatacataccacagtatgtataaagaacacactccattcattatgccctctaatatgtctaaattttgttataatttctggttattaaaacatgtactcagatctcagaagtaactgtgacacaatgggatttttttatgtgaggtcatacatttttgcaggttattttctatccttagtcccaacctttactagagctaccctgaccatttatacagtttgaccactagatggctctcttgctgcttacttcacaagccaagggttttgtggttttttttgttttttgttttttttttttccactcaccccagcatttcaaaaaactggcctgcacagcatgggaatttcagagaaaaataattaagtgggcttattttttatataatacttatatttaaaatggtagatattctaatagagtacaattaaaattaggtacaaatatttcaagggctgaatcatcaggttttctgatagcccgcctaccaagtatggtgtgacgtgtaccaaggccaggtagccctgcctaccgtgtgtggtgtgagcacagcaacactgaaagaaagacaggcgctcacacgcactccaaggactgcataaagaacatgctgtctcagcttttcctttgcgttttctgtaaacacacacagaaagacattccatgctaggcgagttcctagggtcacttggttcttggatctttagcatggactgatggccaaacttcacagactctcagggtttcggaaggccaaaagaaagaagtaaataaaagaaagaggttcttccagaggggtgaaggagaccatggggggggcggggggagtgtggtgcgggcaggcacagcagtggggcagtgagctgagaactcctcaaccccaggcgggagactgagagtgaaatcaagggctagagggggagccgactgagagagagaacatgtgtgtgctgagagtggtgtatggctctgaaacctcaaagcccacccctagtgacacacgtcctcactgaggccacgcctcctaagagtccccagcagtacttctgcctgtggagtgtgcagtgttcaagttccagaaactgttgctcaaaccacaggagtgaccaagaacatagagcagaaaccggtgggaaaatttgtgctaaactaagatcagaaagaaagaaaattagtcagaggcgtttatcaggtacctctgataactgcatcttcctggagggaacagagaaatatagaaaagggaattgctgaagactaaagatatcctcaccttagagatgataactctgtgcccaaaacaatgaaggataaagatcacacaatatccacacacttaccataaaaggaagatcagtcactctcagccacaacaacttttcaaatggtctacaagttctccaggaactgcgcatttctcaaagacttgacatgggggctagaaatggagagttctcaccatggaggcgtgtacctaggcacagctgggcaggtctgagtctaggatggtagttctcatactttagcagaaagggtgtcctgttcccagggtttctgcctcggacagggtgggataggagagttcccacttcccacaatggctctcgagcagctggaagccagctgtatgtcttacacagtaacgtaacggcagcctcagaagaacaacaaaggtttattttcctccatcccttcttaggaagccacttccagatatcttcatgaagcagggtaaaccgagaaagcaggaagctagggttctgggagacatgagggagaacggcgttggccaaagactacctgccagttatggctaaagaagttgactaggaagaactagtccagagcagagcaggctcatgctcctgaaaacatgtggctagggaaggagaaaagatggtaagacagaaaaggcagtaagtgtgggttttgacttagatgaagctcttgagaagtttgttcgggttttgtcattgttgtttaaggtgtcatctcaggtactccaaactgtcctcaaaaaatgcatacctcaatgactggcaccaaacttcctgtgcagcctagagtgcccttaagcttttcattctcatgctggagttgccggcatgccaccatgtctactttatgtagtactgggtattgaacctagaatccaaacgcagagcctcgtgtgtactaggcaagcattctgccaaccaggggacactcattgcccttaaaactcactttatagccttgtcacaagataagaaaaatgttgggaccaacagatagatactggccatcaagcctgaagccttaagtgcagtcactagaatgcacatggagagaactgactcctgcgggttgtcttctgccttccacatgtataatgtggcatgtgcacatgtgcacacacatgcatgcacacacacgcacacatacacacatgtacatacacaagcacatgtacatacacaatatacgcacatgcacatgcacacacacacacatgcaaacacactctaaacaaaggaaaagcaaaaagaacatgttgattatgggcagcctctctttgcaccttcctagaggaaagattgttatttactagatatttactaagtagtattaactaaaggttgttcatcagtgcctttcatcttattgatatccttattcctagcttgctaggctcgttattaatgtgcactgtgttaacattttttaataatcaaatgttgctaattttacagaagcagaaattgacattcgtttgagagaagaattttctaaaatgtgttttgaaacattgctccagttttccttcagtaacaaagtcacaacaccccaggaaggctacatctcacgaatggcactctctgtgcttttaaagaggtctcaggatgttctgcatcgctacatagaggatgagaggctgagtggaaaatgccctctcccaaggtacgcatttaattaaggaggaaatacattgatatcataatgagtagcaaagattgctcaaaaccaagagatttcttaagagaactagatggaactgaggtcattggtaactgtatgtgccctctacagtgtaaatattcataggttttgctgcagacacataacacttgtgatggtgatgatgacgcttcaggcctttcttgtagattaagaactatgtgatagccggacagtggtggcgcacacctttaatcccagcacttgggaggcagaggcaggcggatttctgagtttgaggccaaccttttgaatctaaagaatattgaatctgaaaatcgaccctctgacagaggctctgcatgagaactgtggattggcaagaaaacacaatctttttctataaagggaaattaagagactaattacttctagcttatttttgattgacatttcttgatttctgtcacctgttcctgtctttttttttttttttttttttaaatgagtaaactgtagctgtcttcagacacaccagaagagggcatcagatcccatcacaaccatagatggttgtagtttctgggaattgaactcaggacctcagaagagcaatcagtgctcttaaccactgagccatctctcccacccacctgttcctgtcttaaatctgttttttctaatctgtttaacaaagcccctgcccctacactgatcccttcttgtatatccagcttgtatttgtggcaggggctgcagggctgatctcagttgagctatggactggaattcaacaacagatatatatctccatccgttttaatgtagaaactggggtttaagtctatatatgtgtgtgtgtgtatgtgtgtgtgtgtgtgtgtgtgtgtgtgtgtgtgtgtgtgtatgtatatgtgtgtgtgtatatatgtatatatataattttgtttaatgtagaaactggagtgtaagtcaaaggaaacagtaactatgaaagggcagacatcctcaggtcaggaaagaattggggacagtgagcccctcatgatgagtttctggtagaaaccgatcagccatgatcctttgtttgtttctgaagttggaagtggtctgacagaggatgtggtcttcttgcttcatcatgcccgtgtcttactagcttgctcgctgcaggtctgttccaggttagatctccccaggatgatatgaatgcctttccctcagtttttaagattttaaaattctttactcatttagagtttattttacagttttctaatttgatgagtgaaatcacaaaattacattttaaaaaatgaccaatacttattaactctctacaatcttgaattttaaatttctagatcataaattataggcctctgccttcagacgtgtatatacagaaacatcctgaggcagcttactagtaatttgattatggacatgattaaagttgattcctgatatatacatgaaagtacagagataaaagctgctttgagtggatattattactagatcataaatattagttcagaaaacatctttttttcatttttttgtgttgaagatgtaacagcttctttaatatttcttttaaattttatttttgtcatctttatttatgtgttagtatgtggacattagtacaagtggctgaagaaaccaggggtgagtgtgtaatgtcctgaagctagagctgtaggcagtgtgagccgtgggatgtaggttctcagaatcaagcgcagatcatctgcaagagcagtccacggtcttaaccactgagctgcctcccccactctacctgctctctgtaatctgagctcgatttatagtcatctgatgaagctgtttcgttctgtgtcacacacagcattatgtgctttctacaagtgacatccagcatcagtctgcttgcacaggccatttggtgcctggggtgcagcttagtccccaaaccacatcaccagggcctgctcgtgaagcttctcgtctcagcagacaggacactgaggcaggaggatcagaaattcaaagtcatccccagttacaagtttgaattcagcctggggaatgtgggagatcctgtctcaaggcttgatgtagtgccctgtgccacactggatggccaggctccctgtgggatccagatctgtaccagcaacccatgggatggaacaccggggtgttcttttcacctttgcatccttcattacacgcttattggttactgttaaatactgctaattggccgtctcagaattaatgtctggcttgcttcatgattgtcgtcatagcagtacagtaagagaggagaagcaggcgagcgtcactgcagttctgagagctctttcagcagcagataaaatacagagcaggggttagaaggagctttcccatttcatctttggcagatttctattaaccagaaaacaaaacatcattttgtaggaagttttaaagcatgtgttgtaaaatattgtagtgactctcgcctttaatcccagctctcataaggcagagtcaggcagatctctgagtttgaggctaacctggtctacaaatcgagttccaggacagcaagataacccaggaaaaaccaaaacaaaacaaagcaaagcaaaacaaaacaaaagtaactgtagctagtggcagggctgccctgtgaatgcaggttttcaggaattgaattgctccactgataattttggtaagcttaactacaaatcagacttggtgaggcaactacagattggtagcaaccacggcactgatgtgtggattgttataagcttgatgagtttgccttttataagaatcttaacctctttttatttcattgtagtcaatatttttctgaaattatatctatttgtacaaactttgggagaaaaaaattatttgttgtatcttaaaaaatcctaatggaaatcatctcttacttatcctttttaggcagcaagtgacagaaatcatattcgttctaaaagctgtcagcactctcatcgactcactgaagaagacccagcccgagaatggtaggtgcttgaggacttggctgtcctcccagacattgcacatctgtcctctctgtcagggttatcactgtgtggtacctttgtattgtcactaaggtaggggaatgtgagaacgtagccccattgtgttctttgttctcccgtcctctccatgacaaaaactcaagtcacatcaactcagtaaagttaacttgaaagctggtaggcctacgagacacccttggctgacaacctgactttgataagaatagaggacagccagctctgtgcatatctaaacatttatatcagagacataatgataaaaaaattataaaatattttatttttaagacaatagtacctgaagaacacctgaggtgctatctggcctccactcatacatgcactcacacacatacatgtgtacaacgcacaaatatagaaaaaaatagcagttggaatcatgctctaaacaaatgaagtgactttttcattttgatgtaaccataagttatggtgatagattagaaaagtataataggcttcatcaagaaaagaagaaggatgccagcttttctgtccgaatcatgtggattgcatagccagtccaagcctgatgcaagagttggctatcaggtgtagaaccaacaggctccacatcgatttaaactttttattattgtcttactatagtgttgttgctggaagtgaggtgtttggagacttaacattttttaagaggttttgtttttattattttgtttgatggtaagtttttaagtaggctatatacatataaataacttaaaacagaggttctcgctgggtaagggcacctgcaccaaacctgagagcttgagttcagtgacgacacgataggagaagaaagtcagctcccacaatcatgtaatacaaaatacatactccaggcacccccagctttccatacaaataaataacaatatcccctgtttgtaatcacctttttcttgtctatttttcacttaaacattatgtatattctttcacatcaatacatgcatctctttaatattctttttgtagtttgaggtttgggaagcagagtcacatagaagtcaggatggccttgggctgctacctctcagcagagggtgaccttgagttactaaccttttttctctacctcccagtcctggggtacaggcatgtgcgggtacacctggctctctgtcaggaaatcccgcagaaatcacagtgggctttaggataaacatgctgtaagaactgaacctgagtagcctcccccaggttctgttgggtgtcatcttcgtgtatctcctctaacaagccgaggggtagtgtagtggcttgactggtcgggtagagccgccatctgtatgctcttccaaaggcagctggaacaggccagataaacttcctagagcagtggtgcctggcttttttgttttgttttttggtacctttgctgatttttttttaagccaacctctaccccaaagcaaaagtaaaaagaaatatggtgtagattcttctttcattattattacataatatttaatgtgtgtgtagagcagggctgaacactgccacacccacatgtgggtcagatgtaaactgcagggacttggttctcttcctgcagtgagtgttaggatcacacagacagtaaggtgtggctgcagccttacttgccaagccgtcttcagggtcttggttcagatcttcacatttcagtaggtaaacaacagaagtgtgcttgctcatccaccatcccctatgttcaccgtgcagccccttctcctcttccagccctgtcctgaagaagcctgttcaaaaacggaggtagggctggagagatggctcagaggttaagagcactgactgcacttccagaggtcctgagttcaattcccagcaacctcatgggggctcacaaccacctgtaatgagatctgacgccctcttctggtgtgcacgagagtgacagttattcacagacatgaaatatcttaaaagaaaaggagttagcagatgcatagttttccacagaagtgacctaaggaaataacattagcactgagcagtgtcagacacattagatgaaaaaaacttgcataagcatctttcttgggaaactgaattatataatctgagtcggcttctcaaccgtaagcttctgagctgctgggctttaagaggagagagatatgaaatgtgaaccgagctgatttgaccagggcttgttccagaaattgagagtctatgtaaaggaacccctttccttatattacatcagaagagctgagacagagaacagttccctgacgtgaccagaataccaagctctgccttatttcggggggtggggtgggggtgggggaatgttaccacctagtaaattagactaaagtatggaataattataaaaagttctttgagccaggtatggtggcacatgcctttaataccagcacttgggaggcagagacaggcttatctctgagttcaaagccagcctagtctactgagtaagttctaggacaaccagggctacacagaaaccctgtctcaataccgcccaaaacagggggcgtgttttgtacactttcatggtactgtttcttgtgtgctacgctgcctcccagactgtgggtttgttccacacagtaacataacatctgccagcaggttttatgtgaggattgaacactacaaagtacttaccagagaatacggggggggggggggggggtcagcctgggtaacttgctgagatactgtatcagactaaaaggtaaaagagagggcccatagccgggcggtggtggcgcacgcctttaatcccagcactcaggaggcagaggcaggcggatttctgagttcgaggccagcctggtctataaagtgagttccagaacagccagggctacacagagaaaccctgtcatgaaaaaccaaaataaaaacaaacaaacaaacaaacaaaaaaagagggcccaaggttcagattagcagtataacacttgtgtgtacatgactctgggccagaccccagcaaacaataggtactataaaagtaacccgtgatttcagtataaacagattactggttctggtgggtcactctgcccacctgatgaagagcatcctgttggtggatgaggttaggaaagcaggctggctcctctgcccagtctcgtgatgtgcattaaagactagcaggctctgtaagatggctgcatctgttcagtgacttgacattcaaatcgctaccaagggcattactgagtaggaaagtgcataaaaaggttttctatttgttcttgacacgcacactatgttttctgacaactatgcagaaaataacattttggaccattgtgttactttaacttgcaaagttcgttggtctctacggctgtcctcactggtcatttctctcttcctcttaagagtttacttatgtttatcttctgtgcatgaatgtttgccagaagagggcactggattcccctgaggctgaaattagaaatagctgttagctgccatgtgggtgctgagaaccaaaccctggtcttctgcaagagcagccagtgctcttaaccacggagccagcttcagccctgattttcttacctaatttctaagtacacaatactctattatctcctttttcatactttactaattatatcatgaagtcttataaaattaagaaattaaaagatgcttgtcgaaccatttctgttatatctttaattgtgtttatgtaaattgggtgaccgtactgtgatctgcactgtattttgagacatttctatttgtattctttgactgcagttgatggcaatacctggtcacaagtgattgccttgtatccgacgttggtggagtgcatcacctgctcatcctcagacgtcggctctgccctgaaagaggcactggctccctttaaggacttcatgcagccgccagcatccagagttcaaaatggagagtcttgagcagctgcagcacgtgtggaggaagagataccctgaggaacgccttccccggagtcttgtagaggacggacgctctactgaagtcactcttggcagctgtgtttgccttctttaaattaaagtgtaattatctgggtacagtaattcatacaaaagcctccatgttaaccagggctcctggaggagctgagcctttgcctgggtgaccgtgctgggagggacagtgagcactgcttcacacctgctaccatgtcttcagttggtgacttaaaagtgagcttatgtacagtttgttgtgtatgtgttaatgatgtactttttaaaaagaaagaaatgatatttccattcagatttttgaggctggtgttttgcaccctttttcaagtacagaatcatactaaaattttatgcaaggtggtactataacattccatactctctacaaccagcccttgagaacaaagggaactgacaatactgtgtgtataataaacaggacagttctgtataaaacagttgcatttatttaaaattttaaaatactgatgatgctaaatgctcgaagctgtatttattattaatacaaacttgtttgcttacgtttctacttctgatttgccttcttgtggggcagataagcttaccgtgtactcgtacagatggcttcatgctgtttacatgcattgtcggtgacgagaaggatcgagggagtgcaacagcagaggtatgatggctgactgcacctctggaatgcaggtcctaacgtaacagagacatgttgtagcaggatgaccggtcatacctcactcctttcagcctctctctgaactctcatgcctctttttacactgctgtctgaattttaaagacttttcatattttctattcctatgctttcaacatctgaaaggcaagatgactttatacttcatgaaacttttctgtgaggttttgttcttctctgttcttccttttctgggttcctcccaagaggacccagcatgaggctgacccacagtctaaagcgcgtgtcccagggcaggcgagtgctggaggagagcagaggctcgctgcgctcaggaggggctcctgctgccccaggagaggactgcagcagggcacgggcctctcacgaaactcacgttgacctagcccgctgtaggttttttaattaattatgctgttacaatattttttccaagtaaaaattttatttcacaagtgctggagacatgaaacatgttgaaaatgttgctattaataagaagtgatagtgaggttaatattattttaatgcactagaaagcttttgactttaacaagattataaattttggtctctccaaaataatcataaacctataaggaggtgttagagttgagtaatcactgaggtagttttgaggctattttaattatgtaatgatttaatttgcactatattctttatatgtgtgacaaggcctattttgaaggaatattatttttactcacatgaatcaatgaatttctattttattattttacttagggttaaggtaaaacatggtatttcatagactctgctgtcagtgttttcttaaaggtgtaaaaaaatgactcaagccgtgtattttttatattttgatatactcacttgtgaattaaagaataggactatcactgataaagtatcaaaatagtaagagtggcaacattttgaaaatattgccatgggtttctataaagtcagtgtccgctcgtgagaaggaacagaggattgcaacctgaacagcccttctctgaagctatctgtgagccagggctctacagcacacccttacctcggatcatctgagctaatacagtattagttttcaggaccagcgagcgtcgtgctgtatagttcaaaacataaaaatgtgaggcatgggttaatgtgcagtaaccagtgccagtctcaatgccaagcaagcgggccactcccttggtagaataacagccccctccccccaatccctctcaacccgcaaggagtgagtcccagtcattaacgcttttgggtcacacatgcttctaggctaccttttctgaaatgtgctggcctcagagtggttaacatggtatccttgtcctgtaaacatgacttgggtttttcagtccatacaagaactgactgcggggttactagatgcaaggatatctctaaagcctccaccacgaagcaccaagttaaatccccttcattgccttcctgtccccacccccgccccacccctgtctcagtgcagtgagttttaaatctcagagtcttcaccactgaccccctctgttagaccactgaacgccaggctgtactaacagcggtgcagtcatggagggctcaatagaactgtttgctggcacaggtcgtcctttgggctctggtggtacaaccactatcaagggagaaagggcaattccgtagcgtctcagttcttcaggattaatcttaaggttttgttttactgcaagcattttgcataccatctattaaaagcctattgtgtgccaaaggtgggggaaaacttgttattaagtctaactagaaaagaagtgcttttaacttgtttatatttttactacactaacattgatggtctcagttgtttcctcacaaatggttattaagtcaacattctttaaattatatagagcatcagaagaaaacagtggagaatttattttctttatgttatcatagtgactaagtcactttaagcagcagccaataacagttatctgtcctttctcctacagtatttagaatgttatatttattgtcggtttggtaccaccttgtcccaggtgagcatttggccaatggtcagctaaaaagctgcaagtgaactaataaactagagaacattgcaaatacatcccttgtaatgaaacacgcatgacagtcatgtcattaaaaggcgccattgaatactctcctcaaacgtagaataattcatgtgcagaaccaaatccgtaagagttggctaagggccgctaaactagaaccctttcaggaaatacttacctgtgactgccactgaaattaactggaaatcaagagccaagatagattacttttcagcctcagaatatcgtgaattataggtttttctaggaaactacctcgaggtagacaaaaacagtctgaaattaactggaaatcaagagccaagatagattacttttcagcctcagaatatcgtgaattataggtttttctaggaaactacctcgaggtagacaaaaacagtctcgattcagaagcatcgccaggagccgagagtgctcccacttatctgccaggacccgagagtgctcccacttatctgccagcagccgagagtgctcccacttagcagagttggctgttgcagctacttgtcaaaagtatcgcagttgactatgcatagtgctacaaggctatcttcattagactgaactgattggttgggtttttttgttgttgtttttaagttattcataagaagaacaggaattatatgacacattgtattactgacttacgtatggtgaaggaatagttttcaatcctttatggtcatttgaattaaacaatttgtatctctggagagtagagtggtgcttttattctaatgctcagtctttgtaagtgggaaagaaagttgtgagtggctcctaatttacatgtaaccccctcagaagacttccacgaaatccagtcgtttttactgtgttagcagtgtctgcatagctgtgcggataagctggatgtagtggctcaggcctgtaagcccagcagcgctcaagagattcccacgaggagtccaggccagctagcactacacagggaggccttgctcagaaagcagacagagcggtgtggtgctgcgtctcattgggactcaatactctgtgatctcaatgtggtgggcagagggcctgcctcccagttcacctttaagcagatcctctaagctgctgctttctgtgtctcagacggtgatgatgccgagtcactgcttctgtagacagatgcttgagggcacagtggcacccttgggtgcttgctcgggttgtgtggtgatgcactcttacggccaaacaggatctgaatggtttttttctttgggcagcactgtcattccgtcctgtctagattataactttgcctcacttcctcctaacctttatttatctctgcagtcctttttattctctacccatcccttctctcttcaggggactctgacagagaccctggcgacggccttcttgttgatgagattgtagcgtgccttctcttcggccactgttgcctgtttactgcgctgaagtcccctaccattttaaacaacagaacaatgtgaagcagttggaggctgttgcctactgtatgtctgagtttgtgattctgctgccaagacacagaacgggattgctataaataactggattcagtagctaaacttggaacagttaggtctgcactgccgcgaacagcaaagcggtgccacttctctttagagggagtatttaaaacttgtaggcatttctgttgtggcttttgaagcagggttgttttggctttggggaagttcctgttttgggaggtaaacactttgaatgtgggtaagtttatgtcatctaaatactaatcctggtgatatgtgcactgcttgcttccagggagtgttgtcatttctgtttcatctgtgtctgcgtttctattacaaagcagtagtttggaggatagtgagacagctcagcagtcaggagcactggctgctcttccagaggaccgtagttcaattctcagcaaccacatggcggctcacaaccatctaactccagttccaggggataggacgccctcttcaggcctgcctggccaccatgcacacacgtggtgagcaggcatacatgcacgcaaactatgcacacacacaattaaatcctgtggctagcaattttgattgaaggccagagtgttttatcttgtttctgagtactcctggaatatgttggtatctactgttgctcatggtgacagactctattacactgctgggaaagatgggatccttgagtaagaaaaggaacattactgaattttgagatcattttcagttgctacaaatacaattacctaaagttttattttaaactaaaactcagtaaatagtgtagccacaaaagatctcttaaaccatgccattatttgcaaaactactgtagcctaatagcaattactacttactgtgacatttttctgggtgcaagaaagactcgaaagagatactattacagtcttactccgcttatctaagcaactaagatattaagatataaacctaaatgcaagttccattttctctgcagcttttactccctctgtgtcataattttagctcacagcactcaacttctttctcaaggcagttgccatatggtgtttatgtcagactggatatatttatctcattttgcgagattccttttttagcttctaacacagttctcgaaagtaataccataccactgtttctgtacgtgttccttacaatccccatgttgttgagatgtatcagttatgcaatacaatccgaaaagtttcttggcttccagtccaagtctttgtaatctgggctaggtgtttcttcagagctccgtagttagaactgttgagtgcatcggcactccgtttgcattcggttctcacgcaggtgaacccacatgttttatccctgtcctactagttaacctcaaccaatgcgtgtaaacagtagatctgcacggaactgtaaggtgaaagagtggagagatacttgttaaagctgttgatatataaagggaaaacagtgaatgtacatagttgtgagaatcttgaaaaacccaggtccggttgaaagcacgcaccctcatgtggggtgcattgggggaggtgggggagcagttctgaacttattaggaccttgtgcctgctaagtaaaatacttagctcccagtctggcttacaccctattatagtattttaagagttttgttgtggtggtggtggtggtggtggtggtggtgctggtggtggtgggtggtggtggtggtggtggtggtggtggtgtatggtggtttttaatttgaggcagctattttgagactgcccctctgtatcagtgagtgctaagcccatccacagctcaaattctgtttcatatcttcttttttgactagacatatagatgtaacttctgatcctccagaggctgaaacaggaagatgacttgaacccagggaccacagggcaaaggagggaaaaaaaaaaattcctgctttgaaaattcctatatcatttagtgtgcagtaacttctaaatcgctgctgtggggtgcttgagggacatagcatttcttctcctttagtccttatagtaggaagttagggtgaggacagcaaagctcagaggtcactttctagagtcacagacctaacccagcacggctcacttgaagacccattttttcggctataaatggtcgttagcaaaaatgtctcattgcattaatatcttactgacataaattactgtttttgcgactgtgcatttggggaaaatatacacaaatattaaatgaacttcaaataccgaggagaaattgtataacagctcacctccgtgtgagctgcatgggactttttcaccggtgcaggtctaaggcatttgtttaaagcctctgggttttgctcgttttgtgtcagcattagtacagtggttaaaaggccaagagtcttcctaaactcagttcctgttgtttgctgaatctgttacctgagcaagttaatcagcccgttttggtgttcttgtctatgaaatggaattaatagtagtgattaatatgtagttattaaatatatcttgacaaggaattttagaaagcactgtgactgtccttggtaagattttagttgtgataggaataaaacacacagttcagaaagtgggcgaggaaacagggcagcctcttccttgtctttcactgcacagccatcaggcatggtcctctgagtgtctccttgtcacgtgactggatattgtagctagatgagaaaaccttatacctcaaatattgctgaatggaaggcaacgtagtcaagctctggagtggccataacacaggcgtgcccttgtcactgccttagagagtagaggcacacgattactaaatcccctatggtgcttcaggttaatactgctcttcatattcaaggggcgaccagaaaaggaaaggagaggctcggtgctgaatatggaactttcagttttgacggctaggaatgctgcatctataaacggcaggatgtggggagatactgaaaaagatggatgatggggggggctcttttttgaagattttaattgtgtgtgtatatgggaaagggatatgtacacatgagtacagatgcctgagaaatctggaagaaggctcaaggtctcctggagctggacttacaggtcctctgcaagaacgactattgagccatctttccagcactaagggaaggtgtgtgtttttagtagaactggcgagggcggggtggagggggaggttggctttgaggaactgaaatctaatcattaaactccttaaaagccaaaaactttgcaaaggcagaggtttacttttaacccaaaactaaggaagataaatgtgtgatgtgtagagtataggtggcgatagagagtagggaaaccagccgggggttagtgttcctgctgaggtgatggtagagaagctaagagtgctgtgtttgcaaggatgcagagaggagaaggcgctgcacaccgtcaccctgccaccctagcacttgagagtcaggcagacgaaaatagttgcaagttgtgagcaagccaggtctagatcgtgagaaaatgtctcaaagcgggagttaggatgaattaggtagattgtacatacttggatgatagtgatggtgagaatattggtggtgacaggacaatgtgtgtgatgattgtattgatgtcggacttgtccgagataaggcagtgcaacaccggaaccaggtttagttagaaacttaccttttagaccaaacgtacacttgatagccacttaaactttaccttttagaccaaacgtacacttgatagccacttaaactccacgctacagtggccagctaacttggcatggcgcaaattaacatgacccactgtgcagcaagttttagccctgttattgtttaagaaaagatgctgtacatatcagtatggcagacagtaaattagcatttcgttgcaagtatgttacacaagcactcaaataaaaaaatttaattaggaataactgaaatgaacatttacgatggcttgaaatactaagattagtataatactgaaacctgtccatagcctaaacaggcaggtagtttgaatatgtatgtatgaaacgtgtaggcgggttgataaaattgaaaagttgtacttcaaataattgggtcctgtatactttgtaagtgaaagttaattcgtgttagtactgactccagggtctgttgtgctaaattgtactggactgggtgggtgtgaggtggggtgagtctccaaaatgaattaaatatatgtattcgcgcgtgtttttaccaaattttgctccagatgtttgtgatctgggggctgtagagattaaagtctagagaaacttcccagattgcaaccgaagatactcatttctctaaccaaccgttctgtatttgtcttgtgtactgtggatttccagcagctttatgaataatgggattgccaaataacactaaataaaggagctaggcagataagtttgaaattcagataccatcccccatttagtatacggaatctacacgtgtaaaaaggagcattcctttacgtggaattccagtttagcaagacatcctggattttatctgacaaatcttagtgactttgaaaacaaaacaaaacaaacaaacaaaaaaagcctttaagaaacctgtaaaagagaagcaaaacgaaaaagttatgtgggccggccacgcggaggtgaagccctactgcagtcggctctcttccaaaccgtgcctaaaaatagggagaaggcaggcgccccacgttcggcgagcgtgcgcactagactcgccgggcacggctttcccgccagtttctgcggcgagcagccgcggccgcgccggggtggagcgctgcgggccgcgccgggcggccggagcgggaaggaggtgccggaactttccccgccggccggggcacaacgtggctcgcccgcccgccgccatctttacagcgcccgccgggagcaccggggctccggaaggcgcgccgagcggacggagctcggcccgaggccccggcaggcccgggcgtgcggcaggagtccccagcccgtgaccgcnnnnnnnnnnnnnnnnnnnnnnnnnnnnnnnnnnnnnnnnnnnnnnnnnnnnnnnnnnnnnnnnnnnnnnnnnnnnnnnnnnnnnnnnnnnnnnnnnnnnnnnnnnnnnnnnnnnnnnnnnnnnnnnnnnnnnnnnnnnnnnnnnnnnnnnnnnnnnnnnnnnnnnnnnnnnnnnnnnnnnnnnnnnnnnnnnnnnnnnnnnnnnnnnnnnnnnnnnnnnnnnnnnnnnnnnnnnnnnnnnnnnnnnnnnnnnnnnnnnnnnnnnnnnnnnnnnnnnnnnnnnnnnnnnnnnnnnnnnnnnnnnnnnnnnnnnnnnnnnnnnnnnnnnnnnnnnnnnnnnnnnnnnnnnngcagagggcgcggccggcccgccggagggagggagggagggagggagcctccgccctggggcgcccggcgcgcgctgccggccggcggcggagaggaggacgaggcgccgctgcgctccgcgtggtccgccggctcccacaccatggccctggctgaggtagtagtttgtgctgttggtcgggttgtgacattgcccgctgtggagataactgcgcaagctactgccttgctagtgctggtgatgctcagcgccgcggaggacaatggccggggatcccctttgttttccggggcgcggggaccgcacggccggcgcggaaaccgttagctccccgcattcccgcaggggctgcgggccgaggcggcggccgcggcgccttccggagcccgcggggagagcgaagccttcgcgattgctccccgagaggagccgcggcggccgcggcacaactttccgcctggaagggttttaactcgtgccgggttttagtttgtctgttgttgggtttcgttctcgaggtgcgcggcggagtgggcgagcggctccgcgatgcacgactgcggtcgcggtcagaacagtcaacgctggaattccaaacttttacgtcgtaacgttttaggggtctgggtttctataggaccgcttcgtttaagagttttaaaatgtaagcctaaagcaaagtagagttttggttttaattgtttataactccttaaacagggttgactttatagttgaatgcactattcgggtctttttttttttttaatgtataaagctaaataaattatttttactgagtgctgtgtttttgttttttctattttttttcttttggtttaactttggaagctcgaatggccatgctggtgtgggggagggccagccttagacttttatgttactatgcttctctatgtctgcattttattaaagacgagtagatcagagttggaagtacgacttccgagagagccgagtattaatgtctaatgacatttgattcttaacctctattagtaaagtacaggttttgtagaaaaagtgtagtttagataatggaaactacccggaactctgtgtggaagaacttgtattttctagttttatttctccaagaggagacatatgatggtaagttgtagtccttttgcttttccaaccttcctctttgatttgtgcataatggttttgatgcagtgtagtaaattttctgtggcacttggatgcttgctttttggggggtggggggcaagtctgtatctcctgtccctttcgataggagtttggtgcttttgtaatttaaaaatgatgcagtgctttgatgaagcttagttttagaccttgaaggcgcccttaata

SEQ ID NO: 1725 - DNA, 5977 bp, Mus musculus
cgactgggctaatggcgtcggcgggtctgggcacccggggcgggcatcgctgaagcttgtggccagctcggccggtgacgcccgccgtggccaggccccgcggcagcgggagggacctgcccgtctggtgggctcctgagccggcgccggtggagcctggtggggctgcaccgctgcgggcaggtttcggcgagcggccggcggcggtgcggggcggcccggggggaactcgggcacgcctcgggagacgcagcccggctccggccgtgcgcccgcccgcccgcccgcccgccgagccctgggccccggctaaggaagactgaggagccgccggctggctgcgggccgcgcaagctgctgacagtgcctgcttggtagtgctggtcccagatcggcggtgacctggagggaccatgtcctgcaccaacagccccgaggctgtgaagaagctgctggagaatatgcagagcgacctgcgggccttgtcactagaatgcaagaagaagttcccacctgtcaaggagactgctgctggaaacataattaacatgctttggcagctaatggaaaacagccttgaagaacttaagctgcttcaaacagttcttgttcttttaacaaccaacacggtagttcatgacgaggcactttccaaggctatagttctctgttttcgactccacttcacaaaggacaatattacaaataacacagctgctgctacagtccgacaggtcgtgactgtcgtcttcgagaggatggtggctgaagatgaccgtcacagagatatagaacctccagtgccgatccaaggaaacagtaacagaaggtctgtcagcacgctgagaccctgtgctaaggacgcatacatgctcttccaggacctctgtcagttggttaacgctgacgccccttactggctagtgggcatgacggaaatgactcggacatttggccttgagttgctagagtctgtcctcaatgattttccacaagtgtttttacagcatcaagaattcagttttctcctcaaagaacgggtgtgtccgctcgtgatcaagctcttttctccaaacatcaagttcagacaaggctccagtacgtcatcctctccagcacccgttgaaaaaccatattttcctatttgcatgcgtttactgagagtggtgtctgttctgatcaagcagttttacagcctcttggtgactgagtgtgaaatatttctgtcacttctggtgaagtttctggattcagataagccacagtggcttcgagctgttgcagtggagtcgatacacaggctctgtgtgcagcctcagttactaaggtcattttgtcagtcgtatgacatgaagcaacattccaccaaggttttccgagacattgtgaatgcactggggtcttttatccagtctctgtttcttgtccctcctactggaaatcctgccacagccaaccaagctggaaacaataatgctggcggcccagcctcagcaccagctaactcgggggtggtgggcgtcggtgggggcgttactctgctgccagcctttgagtatcgaggagcctggatacccatcctgaccgttaccgttcaaggcagtgctaaagccacctacctagagatgctggacaaagttgaacccccaactatcccagaaggctatgccatgtccgtggccttccactgtctgttggatcttgtccgtggaatcaccaccatgatagaaggagagttgggagaggtagaagcagagggtcccagtgtcacagagggagcctcttcacagtcgtcagaacggcgagacgagcaggcggcatccgacccgatggaccaggaaacagcagtgagcagagctgtttgggaagagatggtgagcgcttgctggtgtggccttctcgctgcgctctcgctcctcctcgacgccagcacagatgaggctgccaccgagaacattttgaaggctgaactgaccatggctgctctctgtggaagactgggccttgtgacctcgagagacgcctttataactgcaatatgcaaaggctccttgccgccacactatgctctgactgtgctgaacgccaccactgcggcgacactctccaataaatcatattctatccagggccaaagtgttatgatgatcagcccgtccagcgagtctcaccagcaagttgtggccgtgggtcagcctcttgcagtgcagcctcaaggaacagtgatggttctgacaacagcggtgatgacggacttgccagtgatctccaacatcctttctagactgtttgaaagctcacagtatcttgatgacgtatctttgcatcatttaataaatgcactttgttccttatctctagaagcaatggatatggcctatggaaataataaggtctgccagcatccaaactctcggatgcgggagtggggagcagaagctttgacgtcactcattagagcggggctgacgttcagccatgagcctccacttccacagaaccagagactacagctgcttttattgaacccattaaaagagatgtccaatattaaccatccagatattcgactcaagcaattagaatgtgtgttgcagattctgcaaagccagggagacagtcttgggcctgggtggccgttagttcttggagtcatgggagcaatcagaaatgatcaaggagaatcattaataagaactgcctttcagtgtcttcagttggttgtgacagattttctacccacaatgccttgttcttgcctacagatagttgtagatgttgcaggtagctttggactgcataaccaagaacttaatattagcttaacgtcaataggcttattgtggaatatatcagattattttttccaaagaggggaaacgattgaaaaagaattaaataaagaagaggcagctcagcagaagcaggccgaggagaaaggagtgtctctgaaccggccgttccaccccgcgccaccgttcgactgcttgtggctctgcctctatgccaagctgggggagctttgtgtggacccccgccctgccgtgaggaagagcgcagggcagaccctgttctccacgatcggagcgcacgggaccctgctgcagcactccacctggcacaccgttatttggaagtcagctgcactcagtaaaaacaatgaagtgtccctggccgctctgaaaagcttccaggagatattacagattgtgtcccctgtccgagactcagagaagcccgagccccctgccgttagcgtgcccgtacccgtccttctaggaaacctttccggcccaggcctgagcaggccgtttgtgaggacagactccattggagaaaagcttggcagatgcggctcggagacgcctgtggtgactgacgagctggaagatctgaagctctggtgggctgcctggaacacctggcacaggactggatctgaaagcacagagccgcccagctccgtcgatgagctgacctttatccccagccagcctttccttacagccttagttcagatcttccctgccctctaccagcacataaaagctggcttcagcatggccgacttgcagaagctgggcgtcatcctgcacagcgctgtctctgtccccatcagttctgacgcctctcctttcatccttccgtcttacacggaagcagtcctgacaagtttacaggaagctgtgcttacggccttagacgttctccagaaggccatctgtgttggaccagaaaacatgcagatcatgtacccggctatatttgaccagttgctggcgttcgtagagttttcctgtaaacctccacagtatggacagctggaaacaaagcacattgcaaatgccaagtacaaccaggcggaatgggtagccttgaattatgtaccgtttgctgaaagatctttagaagtagttgtggatttgtatcaaaaaacggcttgtcataaagcagtggtgaatgagaaagtcctccagaatattattaagactctcagggttcctctcagtttgaagtattcatgcccttctgaaagcacgtggaaactggcggtagcctctctcctcaaagtcctgtccatcggactgcccgttgcccgacagcatgcttcctcggggaaatttgacagcatgtggccagagttagccagcacgcttgaagactttctctttactaaaagcatacctccagataatctctctattcaagaatttcaaagaaatgaaagtattgatgttgaagttgttcagctcatcagtgcggagatcctcccgtatgccaacctcattcctaaagcgttcgtgggtcagatgatgaccatgctcaacaagggctccatccactctcagccgtgctcattcacagaagcagaaattgacattcgtttgagagaagaattttctaaaatgtgttttgaaacattgctccagttttccttcagtaacaaagtcacaacaccccaggaaggctacatctcacgaatggcactctctgtgcttttaaagaggtctcaggatgttctgcatcgctacatagaggatgagaggctgagtggaaaatgccctctcccaaggcagcaagtgacagaaatcatattcgttctaaaagctgtcagcactctcatcgactcactgaagaagacccagcccgagaatgttgatggcaatacctggtcacaagtgattgccttgtatccgacgttggtggagtgcatcacctgctcatcctcagacgtcggctctgccctgaaagaggcactggctccctttaaggacttcatgcagccgccagcatccagagttcaaaatggagagtcttgagcagctgcagcacgtgtggaggaagagataccctgaggaacgccttccccggagtcttgtagaggacggacgctctactgaagtcactcttggcagctgtgtttgccttctttaaattaaagtgtaattatctgggtacagtaattcatacaaaagcctccatgttaaccagggctcctggaggagctgagcctttgcctgggtgaccgtgctgggagggacagtgagcactgcttcacacctgctaccatgtcttcagttggtgacttaaaagtgagcttatgtacagtttgttgtgtatgtgttaatgatgtactttttaaaaagaaagaaatgatatttccattcagatttttgaggctggtgttttgcaccctttttcaagtacagaatcatactaaaattttatgcaaggtggtactataacattccatactctctacaaccagcccttgagaacaaagggaactgacaatactgtgtgtataataaacaggacagttctgtataaaacagttgcatttatttaaaattttaaaatactgatgatgctaaatgctcgaagctgtatttattattaatacaaacttgtttgcttacgtttctacttctgatttgccttcttgtggggcagataagcttaccgtgtactcgtacagatggcttcatgctgtttacatgcattgtcggtgacgagaaggatcgagggagtgcaacagcagaggtatgatggctgactgcacctctggaatgcaggtcctaacgtaacagagacatgttgtagcaggatgaccggtcatacctcactcctttcagcctctctctgaactctcatgcctctttttacactgctgtctgaattttaaagacttttcatattttctattcctatgctttcaacatctgaaaggcaagatgactttatacttcatgaaacttttctgtgaggttttgttcttctctgttcttccttttctgggttcctcccaagaggacccagcatgaggctgacccacagtctaaagcgcgtgtcccagggcaggcgagtgctggaggagagcagaggctcgctgcgctcaggaggggctcctgctgccccaggagaggactgcagcagggcacgggcctctcacgaaactcacgttgacctagcccgc

SEQ ID NO: 1726 - protein, 1464 aa, Mus musculus
PGGTMSCTNSPEAVKKLLENMQSDLRALSLECKKKFPPVKETAAGNIINMLWQLMENSLEELKLLQTVLVLLTTNTVVHDEALSKAIVLCFRLHFTKDNITNNTAAATVRQVVTVVFERMVAEDDRHRDIEPPVPIQGNSNRRSVSTLRPCAKDAYMLFQDLCQLVNADAPYWLVGMTEMTRTFGLELLESVLNDFPQVFLQHQEFSFLLKERVCPLVIKLFSPNIKFRQGSSTSSSPAPVEKPYFPICMRLLRVVSVLIKQFYSLLVTECEIFLSLLVKFLDSDKPQWLRAVAVESIHRLCVQPQLLRSFCQSYDMKQHSTKVFRDIVNALGSFIQSLFLVPPTGNPATANQAGNNNAGGPASAPANSGVVGVGGGVTLLPAFEYRGAWIPILTVTVQGSAKATYLEMLDKVEPPTIPEGYAMSVAFHCLLDLVRGITTMIEGELGEVEAEGPSVTEGASSQSSRDEQAASDPMDQETAVSRAVWEEMVSACWCGLLAALSLLLDASTDEAATENILKAELTMAALCGRLGLVTSRDAFITAICKGSLPPHYALTVLNATTAATLSNKSYSIQGQSVMMISPSSESHQQVVAVGQPLAVQPQGTVMVLTTAVMTDLPVISNILSRLFESSQYLDDVSLHHLINALCSLSLEAMDMAYGNNKVCQHPNSRMREWGAEALTSLIRAGLTFSHEPPLPQNQRLQLLLLNPLKEMSNINHPDIRLKQLECVLQILQSQGDSLGPGWPLVLGVMGAIRNDQGESLIRTAFQCLQLVVTDFLPTMPCSCLQIVVDVAGSFGLHNQELNISLTSIGLLWNISDYFFQRGETIEKELNKEEAAQQKQAEEKGVSLNRPFHPAPPFDCLWLCLYAKLGELCVDPRPAVRKSAGQTLFSTIGAHGTLLQHSTWHTVIWKSAALSKNNEVSLAALKSFQEILQIVSPVRDSEKPEPPAVSVPVPVLLGNLSGPGLSRPFVRTDSIGEKLGRCGSETPVVTDELEDLKLWWAAWNTWHRTGSESTEPPSSVDELTFIPSQPFLTALVQIFPALYQHIKAGFSMADLQKLGVILHSAVSVPISSDDFILPSYTEAVLTSLQEAVLTALDVLQKAICVGPENMQIMYPAIFDQLLAFVEFSCKPPQYGQLETKHIANAKYNQAEWVNYVPFAERSLEVVVDLYQKTACHKAVVNEKVLQNIIKTLRVPLSLKYSCPSESTWKLAVASLLKVLSIGLPVARQHASSGKFDSMWPELASTLEDFLFTKSIPPDNLSIQEFQRNESIDVEVVQLISAEILPYANLIPKAFVGQMMTMLNKGSIHSQPCSFTEAEIDIRLREEFSKMCFETLLQFSFSNKVTTPQEGYISRMALSVLLKRSQDVLHRYIEDERLSGKCPLPRQQVTEIIFVLKAVSTLIDSLKKTQPENVDGNTWSQVIALYPTLVECITCSSSDVGSALKEAPFKDFMQPPASRVQNGES

SEQ ID NO: 1727 - DNA, 54200 bp, Homo sapiens
gatcacagcactgcactccagccttggcaacagacccagaccttgtctctgtaaaaaaaaatgataataataaaaaggctgttttgtctacattgaaaatctgttggtcagtgtagccaccttcatcggtgatcttagctagatctggataacttgctacaggttctacatcagcacttgctgcttcaccttgtacttgtaggttatggtgataacgtcttttcttaaacctcatgaactagcccctgctagcttcagacttttcttctgcagcttcctcaccttgctcagcttttatagaattgaggagaattagggtctttctctggattaggcgttggcttaagggaatcttgtagctggtttgaccttctatccagacagctgaaagtttgttgataccatcaataagcctgctgtactttcttctttctttctttttttttttttttttttttttttctgagacggagtcttgcgcttgttacccaggctgaagtgcagtggcatgatcttggctcactgcaacctctgcctcctgggttcaagtgattctcctgcctcagcctcccatgtagctggaattataggcgcccgccatgatgtactttcttatagtttgtttgttctttggagtagcacttttcgtttccttcaagaacttatcctgtgcattcacaacttggctcactggcacaagaggcccaggttttggcctgtcttgattttcgacatgccttcctcactaagcttaattatttctagcttttgattgaaagtgagacaaatgcgactcttccttttacttgaacacttacaggtcattgtagggttattaattggcctaatttcactgttgttgtatctcaagaaatagggaggcctgagaagaagtaaaaagatgaggaaacaacctgacgatgaaacagtcagaaaactcacattaagtttgccatcttacataggtgcggctcatgcaccccaaaatagttgcaatagtcacatcaaagatcacggatcatagatcaccataacagacatagtaataattaaaaagtttgaaatattacaagtattactaaaatgtggcacagagacacaaagtgatcacatgctgctggaaaaaaacggtaccaacagacttgttcaatgcagggttgccacaaacctttataaattgcaatttataaaaattacaattatctgtgaagcacaacaaagagaagtgcaataaaacaaggcatctctgtaatgaaatcttagagaattgttaacattacatgaaataaacatgcacagaattgttttcaacatatattttaaggcaattatttagaatcttttaaatgtatattaaaactcagaagttttataaatttgaactttaaattttcctcacaagctagataagttactacattcatctcttcctacgttcagctcttaatatttgtggcttctgcatctgtagattcaaccaactataaatagaaaatttttttttaaaacaagatagttgtatctgtactgaacatgtacaggctttcttgtcaatattacctaaatacagtataactagttacatagcatttaccttatgttaggtattaaaagttacctagtattattcaaagtatacaggaggatgtgtgtagattatattcaaatactacaccattttatataacagacttgaggatttgtggatttgggtatggggtgggaggtcctgaaaccaatcccccacggataccgagggacaactgtattttactattactattatttttcccatttttacatgggaaaaaatgtaagcatgttgcatatatgattgcaagtgggtggctagtgcaacattgcttaaattactgctggatagcacctcctttattttacatttatgttcacagtactggattctctacattttaaccattggcataattatcattaatataagatatgtttggaaacagtaattgctcgtgtatgaaattacaaacttattaaacaatattaaggaattgttaacattgttagggtgataatgatattatagtttttttttatagttaacagttgttatatttaggtggtagatacatcaatatgttcaagttccttatactattcttggttttttgtatgttcttgacattttttataataaaaaagtaaaaaaaaaaaagttagctcaagattgtttccccactttctcctgaaataatgtagagacactgacagaagaagagatgttttcattgaatctattctactaggaaagagatttttgaagtaatgtttttaaagttttactctgaaaggtaaaacagccacatgttgcatatttatgtgtttaaaacaaaaccttggatgaactaatatttttctactttgctttttagtggaatatttcagattattttttccaaagaggggaaactattgaaaaagaactaaataaggaagaggcagcacagcaaaagcaggcagaagagaaaggagttgttttaaatcggccattccaccctgcaccgccatttgattgcttgtggttatgtctttatgcaaaattgggtgaactatgtgtggatccccgtcctgctgtcaggaagagtgcagggcaaactctgttttctacaattggtgcgcatggaactttattacagcattcaacctggcacactgttatctggaaggtattgtaaaatagattggactatcagcttttaatgagtcatgcttatatattaatactttttcagttaaacttatttcttttaatttttaaagaatttccatgcatttgtgtatttgacaaaacaggaaataactgtgtcatattgtaaattgtacctcataaagagcaaattaaatattaacagccttatctctgtttctgtcttcatctcttattattatatctctcgtgatttctgcctttgcctttctgtctcctttttttcccccagttttcccaaatggtaaaaaccaggagttactaaacaacaaagggtaatcaatcccttaccatagagtagaaagcttttggggtttttgtttgttttacttttgaggtctacttatagatatgtaatttaaatataatcaaaagagaattttattaacagatgaatatcaatagcaatgaagtttatttgtagactcaccaaacaaaagtaacctccaaatggtatattgtacatgtaatgtttattcattaaattacaatttcatttttttcttcttttgaaactttctaataaaatcagcagtttattagtgatcattccctctttgctaaaagtctcatcttttttgttccatctgttccattataataaaattctgtttataatcctttcacttgcttttgtgagtttttcaaattaatagaccccaaaatgtcttcttaaaaaattaatgggctgggcatggtgactgacacctgtaatcccagtactttaggaggctgaggcagcaggatcacctgaggtcaggggttcaagaccaacctggccaatatggtgaaaccccatatctattatagtaaaagccctctttccttctgtcttgtatttcagttccatcccatagttcctcctcagatcacaaacatgcttaattctcccatacagtttgtttttaatctaatacttttctgattctaattttcctttcaagcaacttcattttttatcttcttgctgcctaattcttaatgatttttttctcacacaccttgcattgtcttattttctgtaattgatttccagactattctacttcagtctcttaaacattagagaataacagaatcaccttaaagacttgttaaagcacagatttttgagccactattgtcagccctccctgaacttgagtttctgattattttggcctggagtgagtcctgagaatttgaatttctatcaagttcctgggtgaagcttgatgctgctggttagttcagagaccacactttgagaaacacagaaattattcataggctacagttggtctttttttgtgagtgaaagatagggtcttgctctgtcacccaggcttgagtgcagcggcctgatcgtagcacactacagccttgacctgccaggctcaagcgatcctcccacctcagcctcttgagtagctaggactgtaggctcacactaccaagcccagctaatttttaaaattttttttgtagagatagtctcaccatattgccccggctgttctcaaactctaggcttcaagcaatcatccccactttatggccttccaaagcactgggattacaggtgtgagccatctccagtaattctacttttgtcctggacccctctccttacctttgtgtgtgtgtgtttttgttttgtcgtgatctctgctcactgcaagctccgccttccagattcacaccattctcctgcctcagcctcccgagtagctgggactacacgcgcccgccaccacacccggctaattttttttgtatttttagtagagacagggtaacactgtgttagccaggatggtctcgatctcctgacctcgtgatccgcccgcctcggcctcccaaagtgctgggattacaggcatgagccactgcgcctggccagctttgttcttttcttatacattaacccataaattctccattgatgcctcaacaagtcttatattttatccatttaatttaatttaattttttttttgagacaggatctcactctgttgcccaggatggcatgcagtggcatgatcacagctcactgcagcctcaacctctcctgggggctcaggtgatcctcccacctcagcctcccaagtagctgggactacagatgtataacaccacatttagctaattttgggttttttttttggtagggactgggtttcgccatgttgcccaggctggtcttgaactcctgggctcaagcaatctgcccaccttggcttcccaaagtgccaggattacagatgtgagccattgtgcccaaccttatttttttatattccatgataaacttaagaatgtataattatggccaggcacagtggcccacgcctgtaatcccaacactttgggaggtcgaggcgggcagttcacctcaggtcagaagttcgagaccagcctggccaacatgatgaaaccccatctctactaaaaatacaaaaattagctggtgtggtggtggacacctgtaatcccagctactcaggagtctgaggcaggagaatcacttggacctgggaggcagaggttgcagtgaggcgagattgtgccattgcactccagcctggatgatagagtgagactccatctaaaaaaaaaaaaaaaaaagaatgtataattactctattggtcagtttcctccaatatatagggattgataagactgtcaagtatattttttgtaacaatttgtagattcttatgctgttgctcctatgctattacttaagctatattatcaatgcattttaaatgacattttaataaatatttaggtactctttcatctactggacagagttcgagagtcctctaccactgcagacaaagaaaagattgagtctggaggtggcaatattctcattcatcattcaagggacaccgccgagaagcaatgggctgagacgtgggtattaacattggctggagtagcaaggatcttcaacactagaagatatttgctgcagcctttaggtatacgtacatttttttctgattatacaagtaattaatgttaaaagaaatttggaaaatacagacgattcttttagagtctatcttaacttagtctttatgtgtggtgtgtgtgtaagcatctgtgttttcattcgtttgtacctactgtgggctagcctctagaggatacaatgaaaggcaaaatacacgtcattcttgctatcatgggcatgaggaagtacccataattacataaataaaggcgaaatttctacaatgacgtgttacaaggagtggtactttgtgagcttcggtaagtatttgacctggccagtgaattccagatggactttcctgagaaagcaatagttttcctgagatctgtagggtaagtaggagttcatcaggcaagagtaagacgaagtgtggagagccttatagtcaatgagagaatgtaaaagagacaggagaagattgaggaaaagagatggtggatgctagcatgtttaaaggtctagaatgaggagaataagaaagagtttgattatcaaagagattgagaggtagtgaaaggccagatcatccagatcatgtagaatgtcttaggagaaagttaggaggctgggcatggtggctcatgcctataatctcaacacttcggaaggctgaggcaacaggatagcttgagcccaggagtttgaaaccagcctgagaaatataatgagatctcatctctacaaaaatttttttaaaataaaaaatcatccaaatgtggtggtgcacacctgcaatcccagctacttgggaggctgagttgcaaggcttgcttgagcctgggatgtggaggttgctgcagttagccaagatcgtgccactgcactcaagtctgcgtgacagagtgagaccctgtctcgaaaaaaaaaaaaggatttcatcctaagagcaatgaaaaaaactactgatagattttaattcatgatttgacatgatcaaatatgcacttcaaaaagatcacaaagtgcatgtcttagtgtatatgtagaatggaatggcaacaaggaaggatgacaggatgttgttggactggttaggaagctgttggttgtgtatatcagtggttctcaaacagggcctattatactcccataagacatttggcaattttggagacatttttagttgtcataactggggaaggttgagcattactgctatctggggagggtagaggcaagggttgatgctacacatcttacaatgcagcctcctataacaaagaattatacaaccagaaatgtcaatggactaagactgagaaacctggttgccgattatactactttcaattctggtggtaatgctggtggtggtagaaaaaggtgaacagagatacttttgtacatagttatgagcatgttgtacatattatctattttattatttcgtgtttggcattttttaaactaatttatgttaaagcacaagcatatttactcattccataagcatttttgtatattgttctttatgtgcacttttttctccttttttccaaaaactatttatggtgtctgatccatttagcatgttagggcttggtatatgtatttttaaatattgggattttttcatataaaatttacgtacagtgaaatgcacaaattttcactgtacatttgctaagttttgacaaaatgagcatcatttttagtaccttcatgatatttctcttaaaagctgagaacgaatagatttatatatatatatattttttttttttttttttttttttttttttttgagatggagtctcgttcttgttgcccaggctggagtgcaatggcacgatcttggctcaccccaacctctgcctcccaggttcaagcgattctcctgcctcagcctcctgagtagcagggattacagacaggcatgcgccaccatgcccggctaattttgtatttttagtagaaacgggatttcttcatgttggtcaggctagtctcaaactcctgacttcaggtgatctgcctgcctcagcctcccaaagtgctgggattacaggcgtgagccatcacgcccagcctagatttagattttttttaaatgaagacataagacagttaatgtctttgataattttttataactttaagaaatgatatttgttattttagaataagttttatatttttaacataaccacgtgcaatatataattatatctactcttttaaagggaccccttctctgacataaaatatgttaatagagaaattgcaggagtttttctccctaaatggcacgggatattctaaatctgatattaggtcaccattctgattggcaaatatagtgattcatgagacttttaaactttgatggcaacaggtagaagtgttttaattgtttgacattttaaaatgtaatttgtcaaaactcttttaaacagtttacttaaaattctgtgtttttattgtatgtaaattatacctcaatttttttttttttttttgagatggagttttggagtttcactcttgttgcccaggctggagtgcagtggtgtgatctcggctcactgaaacctctgcctcctaggttcaagcgattctcttgcctcggcctctgagtagctgggattacaggtgcccaccaccatgcccagctaattttttgtatttttagtcgagacagggtttcatcatgttggccaggctggtcccgaactcctgacctctggtgatccacccgccttggccttccaaagtgcagggattacagatgtgaggcactgggcccagccctcaatttttaataaaaagaatatggaggggaaagatgcatataactaggcaggtgttacagtttgtccagagtaggcagatagtacctattgttttataccagacctacttcaagcttttctattaaccgattgctttcccaggaatttggggtttatcccttttttaaaaaaatctggtcatttatcagctttccaaaatgaaagtccttaaaccttgattatttattttacatgtttcatagcctacttatgttgtactgctttggaaaatatcaactttcctaattttttacatcattttaatgtaggtatgtggataataatccatgttattaacaaagccagtaggcttgtttgctgtagggaaaagatctggctggacatggtggctcatggctgtaatcccagccctttggaagactgaggcaggaggattgcttgagcccagcatgggcaacatggtgaaaccctatctctacaaaaaatacaaaaattagccaagtgtggtggtgtgcatctgtagtcccagctactcaggaagctgaggtaggaggatcgcttgagcccaggagttcaagaccagactggacaacatagcaagatcccatcactacaaaaaataatttaaaaataaattagccaggcatggtggcatgtgcctgtgatcccagccacacttgggaggctgaggtgggagaatcacttgagctcagtgagccatgatcataccacatgacactctagcctgggtaacagagtgtgataccatctcttaaaaaaaaaaaagaaaaaaattctgcagctctaaaataatttaaatatgaaaactaaagtataaagttaagatttatgaatgtgacatagtttatcttaaatatttaggccaataaaaaaacatgtattatactgtcctaagttacgacttttccaatgattctctggttaagaacgagaacttcttacttaatcattaataaaggtgggtagactgaagatgttactgaaatgcttttgtttcaacctcgttgatttaattttctgttatcctttggcagaagttctgggaaatggtataaatatgtataagtacatacatattttggggtttttaatttttttttatttcagtagcttttggggtacaagtggttattggttacatggatgaattgtatagtggtgaagtctgagattttagtgcactcgtcacctacctgagttttgtttttaagattgaaacattatttgatatatccatcatcctcctcttggtgccctttgttcctatatctgaaaaatttttttactgaatttctaggttgtgataattttaattcccattgttagtaccttagtacctagtcatatattttccagttctgtaggattttaagcagaaaaattaagcaaatatgctttcaagtgtctaatatgaagagaaaatttgatcgcttttatgataatagtttttttttctcttcctaatataggagatttttcaagagcttgggatgttcttcttgaccatatacagtcagcagcactcagcaaaaacaatgaagtatctctggctgctctgaaaagcttccaggaaattttacagattgtgtcccctgtcagagactcagataagcctgagacaccacctgtagttaatgtacctgtgcctgttcttatagggcccatatcaggcatgagcaggccatttgtaagaacagattccattggagaaaaactaggaagatatagtagctctgagccacccattgttactgatgagcttgaagatttgaatctatggtgggctgcgtggaatacctggtatagaattggatctgaaagtactaagcctcctattacttttgataaactaacttttattcctagccagccttttcttacagctttaattcagatatttccagctctctaccaacacataaaaactggtttcaatatggatgacttgcaaaagttgggagtcatattgcacagtgctatttcagtcccaataagttcagatgcatccccttttattcttccatcttataccgaagcagttttgacaagtttacaggaagctgtacttacagctttagatgttctccaaaaggtaatataattttagtggctaagtaatactgcatatagttctctgaaattttttttattttgctatatatttgcggggataaattttagatcatcaagattgttttatatgtatactttgggataaactgaggattgtcaagatctaggtattttgaaaacttgtggatttctgttgcattttgaaaggtaattcatgtatgttttgaatcttaaagaagctgcctgcatcctaatgtttcacttcaccaggatttttggtttgtccacgcaagtcttcacaagaggatataatatttggaataaaagttttagtaaagtacttttataattagaaaattaataagcagtgggattatatttttttaatctgtgcttaaatttagttctgaaattattgaaagcctatattaaaaaaagaaatttataaaaagtatttttcctcatggtttttaaagagatttatttttactgtgtgtattttgttattgcaaaaaaaatactattcagataaacagatctaaaattatggagcaaattcagattagcaagcaaggctagatcaaattcaaagtgttttttagactagcaagaaaaattgatagcacaattcacagtcatcaaaatgctaagctttaaaaaaatgccaactgagtagccagccattccaacaaagtaaaaacattctaataagattggagtagatctagattctgatcacacatgttatcagtaaccatttgtgtagtgtaaattagatttctgattaactgcatcttacccaactggaatgataaaaattttcacagtaagaatttctactgtatgatgatacctcttaattacctctggaagaagtttagctgagcagtagttcttgaactgttgaaccctagttgtgttgtgcaggaaaaaagaatctggcatttaaaaaaattcagtgtaggggtattagttttctacaattgaactcaaaatacccatctttattttcaatggggaagaaaagtaattacccaccctgtccattggacatgcaaataagttgcttatagacttcaggggatggaagagttatcctatcagaaaagaaaataagacataggccctttgagatgcccgtaatctggtactctgattcagatctttgattcaggtttttatatatgtgtacaggataaacaagaaactttttttttttttcagaaaaaaatgtaagttttatttttaaaaaactctgctttagcagtgagaggaaaagtggaatcatttatcccaactactagtaatttgttcagagcttttaatagctttgaaaacagtctgaaactttggaagggttattgttgttaatttatattattttaaaattattattaatgttcacactagccattgttgtgttgtatgattacctaaatgatgtttcatagaccttgaatgtgagatttttaatgggtttctagtatctcctaacagaaaaatgtatattttattatcagagtgtttttatatttttttccacagatgtaagaaaatttttgcacaagccaaatttacttgcttttggactttatccttaaactaatagttatcgagcaaaacactttattgatagaaagctattttctttcctaagagataaactgatttctgatatcatgttttctttctaaaggggagcatttatgttgttcttcctcagtgcttttatattgtttaggacttcaagttctcagtcttctctttgttctcaaaccaccagttcccagccaagttgacttagttatatgtgctaatttatttatttatgtattgccaagttattttagcatacatagaggaactgggaatttaattatctgctttctgtatgtgctttactgtaagtcctgaagtcaggaaactgcatctgtcttattttttgctaaacttcttagtcagatggctggataccatatctgcattaatcaccggggctgccggagttgcactccaggagacagcatcacattgtatgtgaatgatgcccttggagttgtgtaacaaagccctgtcttctaaataacatgggcaagtttcttaatctttctatacttcagcctcctcatctataaagtaaaaataataagtctacaactttttgcttgttatgtgggatatttgtaaggcacttagtgcctggcatgagttaaacatccagtaaatgttagctgttgttattttcatcatcaagttctctagcaaagaccttagtacgtgccaggcactgaaaagattattattaaatgagttagtaagtgaaaccttaaacaatataagaaatcaggtgttcaatattttttcttgtcttcaaatagacagctttcaaggactaataggaaatattatctagattgcttatcagttcttagcttttggactaaaatttgttatcaggtttattctatagatttttctgatattcagacttcagaatactgaagaaaagcccataaaaactttttcttagatggagtttgttgttaaaaaattgtgggttccaaattatgcattttaaagtccccaaattgctctatatatcaactataacactattagtatgttttcttatcataaaggaccattgaaaatcaaaatgcatagttaagtcattaatttgtgttaagattcttacaaagaaattataatacttagttttctcaggtacccacataggttttttgttgttgttagacattgaaaataaaacaattcacttagagtaattcagtctctttttccacagtaattactacttgtttacttctaagagttaagatccagcaagaggttaatgaggaagaaagtagaactattacaagcagtcagtaaagagaatttttagagtgtataaattttactattcaaattcttcattatttctgagaaaaaaatattgagacatggtattagatgtctttttactactttcttacattataattataggacaatcacacttgggtatgggcagcacttgcatatctactttatatctcagtgcagttttatctaaaagttccgttatagctaaatggctacatctcctctgagggaaaataaaactaatgtgttatctaataagctaaaagccatggagtgcataaaataaattttgtacatactgtttttaaagaaactttttaaaaaagttaaatggtttgaattttggtttaagattttaagagtacctaccctctcaggcataaagtgatcatcctttttgtcttataaagcacaagtatattttagacacttcataaataatatcattaaatgtttttctcatggagaaaaatgaagacttaaacaagaaaatacgaaaagaaaaatttgtggctagaaaaaaaaacccaatttaagtattttcaacacatttgaaataattaaaatctgcagtatcatgatatgcattttattctttcttcctatcaaattatttgaagtaagaaacctagagaaactagttactatttattaaaatgttttcttatattaaaatattttattttaaatcaaatcgatatatttagatacatttcacattaaatatacacagccctgtcaaaaattaatccatacatttcttttagaaacaaattttcgtagatgacttattttcccaactgtaacacacatgattatttgtttaagttggtggaccaggcatggtgcagaaatcagatgtcatttcaatgaactgatatcacagaatttgaagtcagtgtcatcgtggtcagtcacacattcttaatggcctaatggctgtattactgaacaaatgatcagattgtagaacctgaggactgcctgggacttcactttgttggccctttttctattcttttaagaaataaatcacactgtaaaaaagaacattttttagctgattaacagtttcagcctatactttattctataacagtttaaaatagtttgtgtcctttagggctcagaaaagatggtataatacataaaataagacagtttttaagattctgtggttaaacaaatatatacacagtaaagaacttaatggagttcagattatgcattctaatgttcttattttgcttttataggccatttgtgtaggaccagaaaacatgcagataatgtatccagctatatttgaccagttgttggcatttgtagaattttcctgtaaacctccacagtatggacagctggaaacaaagcacattgcaaatgcaaaatataatcaggtaatttactgtaaattttatttactttgtaagatttcatggcttataaatacagatagttccacttaagatggactttgattatctcggaaaaggatacttttcactcacaaatatatttatacatgtctgttagcagtttaagctgaacagaaatattgtttgggaaactagttctgtgttctttttctcctcatttatgactttcctcttccaactgattcttcagaaagtttggcctttcatattactctccagtacatctttcttgaaaaatataagttcctttgtacctctttcttggttgccccatcccaatacaaaacagcttctaaatccctaagtctaatcttacttaaaacagatacctgccatgcaagatgaagaaactgtttgtactaaataagaagttgtacactactggtgtgaagtttagttggattttatataaaatatttttatagccatagttggcaaattttaactttgtttaagtaaatttctgaatgcatgcccatgctgattttgttcactcaacataaaaattataattttatatcgtccgaaagtagtttaaatatgtattaacttttctcattctatttgtcttgcaacacaatggaatcacaatagatccaactatttgcaccggtgagttaaatttcctaaaattgtcctaacctcttggcaacaaataaagtacatctttcccggttcttggtagaatgctgtatgtgctttttccaatagttttaatttttgcctggctgaaaattatttttttcatgaagtacatatctctttgaaaactttgcatgtaatataatctgacctaaaaccaaggcctgaactttaagacaaagatgctttctctttgaaaacaatatgattaatttaatctcagtttatttttaactgcatgtgaaaatattactttctaggcggaatgggtagccttgaattatgtgccgtttgctgaaaggtctttagaagtagttgtggatttataccaaaaaacagcgtgtcacaaagcagtggtgaatgagaaagtgctccagaatattattaaggtatctttttttcatttctacactttcattagatggtgtgaacattattgaaattattccttaggtaatacattatcattatattgggataaatagaaaatacaatttgtagtattatttgtaatgacttttctccaatattcatgaattgtatttagcaagccatttttctaaaagttctttttagtgaaaaatattttaacataaatatgcattaaatttgttacagttcttaatgagaacacatggacacaggaaggggagcatcacacaccggggcctgttgtggggtggggggagggggagggatagcattaggagagatacctaatgtaaatgatgagttaatgggtgcagcacaccaacatggcacatgtatacatatgtaacaaacctgcatgttgtgcacatgtaccctaaaacttaaagtataattaaaaaaaatttgttacagttcttacattttcccacataacccagtgagggggtttcttaggacaatattcctcaaggttcaagattgatgagcattcagagagaaattcacaatgcagcccatacacttaactgaacatgcatgctgacttttttaaagccacttttttagtatatggacagccatttaaaagattcttgttgattgtgttccgttcctctaaggcttatttcttgtttttccctctgttttgaaggactagccctaaaccttgttcttcctctagcatgtggatgtaccttatattgattgtataaataccagaccaacttgagctgtcttctctaaagactcatctatcccaacctttcttcattggtgattattttcatttttctttcagccatctcatacaaggattcttaagccttggatactacaagaattttctctcaactgtacttactactcaaattgtcatcctctttcagctttcctttatttccatatcccttaaacagtttgtggccttcacctagtcaccactcactctttgcctgttgtgtgttggcttacgtccatattgctccacagaaactgctttcttaaacttacaaaagaccaaatcttcatatcctcagtccttctctaatgatttatcttccctatagcatggtactggccttctgaaacctgagccttctgaaagctctttcttcccttgactttcacgatacttttctctcctcactgcttacctcaccaaaactatcctctcactttatttattgagcatatttttgaagcatctttctacaaggtgctagcaattttaaaatgaataaaatgattcttagatttaataattcaatatggagaataaagaaaggcaaacaagtaatactacagtatgttaagtgctaggtaaagaccatagtggaggctttgcattcagatagcctgacttcgaatagtccactgttactggcttactgctttatgacttttggcaaatagacctatctgagcatgtttctcgtctttaaaagaaggataataccaatactacttacatgtcttacctataatgagagaatccattgagatacagcatttaatgatgcttgccaagtaatcagtgctgaataaaaattgagttcctctgaaagacaaaaaactaagtcaactgctgaggggatttgggcaagaattaatagagatgacacttgaaaaagttaagagttaggttaaaaagggggaggcaggtattataggtaaattaagccgtgttaaagatcatggtatatttttaagaaatgttgagaaatttagttcagaacctgggatatgtctgaaaacataactgttggtcttctaagccatcataagatcagactttattctttaaccattgaaggattaaacactacaaagtaatatgaatcagtttgtgtatttttattttttttagagacagagttttattctgtcacccaggcaggagtggagtggcataattatagcttattgcggcctcaagctcctgatctcatgtgatcttcctgcctcagcctcccaagtcgctgggactacaggtgggcaccaccacccccagctgatttttaaattttttatagagactggatcttgctttgttgcccaggctggtctcaaactcctggcctcaggcagtcctctaacctccttctcccaaagcactaggattgtaggtgtgagccactgtgcctggcctcagtttatatatatgtatacatcttttttcttttttttgagacagactcttgctctattgcctgggctggagtgcagtggctcagtcactgcagtctccacctcccgggttcaagcagttctcctgcctcagccccctgagtagctgggaatacaggcacacaccaccacgcatggctaatttttgtatttttagtagagacggggtttcaccttgttggctaggcaggttttgaactcttgccctcaagtgatccgctcacctcagcctcccaaagtgctgggattaaaggcatgaaacaccatgccgagccactcagtttgtatttttaaaggagttaaatgatctcttttctataatcccatttcattgatgccacttaccacattgttttgtggttaattggacaaggctctttctccaaaattgtgaaccttgtggtgacaggcaattactgagcacatactgtataccacttcctgtttagatgtgtaaacatttttaaaaataaaatatataaattgaatggatctgctatgcttaatgtttttcttgattttaataaaatatcaattgcagtagcaaaccatacttttcttttatcttagcttgagttataaaatgtaaactcaaaatggccctatatcacttagtattcttttggttgcaaatgacatacactcaggctctgactagctttaacaataaagggaacttttgggcatgcttaattggaaaattcaaagatagaggaaggccattatgactggctgatccagtggttcagcagtatcatcaaaaaccacatttctttctccagaaagttctgctaagaattgaccatatcgtttctcttcatagctgtaggccagtaacaagattatatgtccaataggaagagagagaggaagagagagagtgtgtatgttcctgcatacacacattcacacacttctattcttcttcttaagttcctaaaattaatttttagtggatcaactttggtcccatacccactcttgaaccaatgattatggccagggaaattgattggattcattggcttaatcaactcatcatctctttgcctgaattcccaaactggaagtagggacagttcctcccaaagcacatggattatatggaggtggaaggaggggaaggggataaatagattctgggtgtgctaattatctgttaatgaaggcacatttcaagctaatatgtaatggttaatatgtatattgtatgagtattcagtaataatttgtgtggaagatgatgatatttggttttatgtccttgaaatatgaaaatttttctacttttagacccaaatttttacgtaacagcagaatttttactctaatgcaaattgcctgacagtatgccaaaactgtttgtcagtggtgctgtgtgttagttcattatgatgttttggttaatctagtgttctaattgcaagatagaactgtgatcagagaaattcattctgaaccaccaaattagttcttttaataaataaaagccacctgtctcaaaagttgatcagttgaaaagagaagtcactatacttagtcactatatatctagtcactgtacatgactcaaacgctctactcctgtacccctcaatggtcaaatcttaaattatcagttttactgaactatttggagaaggaaaaaagtacacaaaaatagaagtaaaaaagtacacaaaaatattagagtaggatataaaattcaaataattttacagatagaacatacaacttcaaagtattgacattttatgttgtgtttactcttccctcaccattagtgggaaaatacagtcatgtactgcttaaggaccgagatacgttctgagagatgcatcattaggccgtttcatcgttgtctgaacatcatagtgtacttacacaaacctagatgatatagcctacttcacacctatgctatatggtctaacctatatatgtggcagatgactgcataagcaatattgaccctttgcatatgggatatccacatcagccaaattattttttgctggaataactatggcagaattttctttttctttttttttttttttttttttttttttttgagacagagtctcactctgtcgccgggctggagtacagtggtgtgatctcggctcactgcaacctctgcctcccgggttcaagcgattctctgcctcagcctcctgagtagctgggactataggcacgtgccaccacacccagctcatttttgtatttttagtagagatgaggtttcaccatgttggcccagatggtcttgatctcttgacctcgtgatccacccaccttggcctcccaaagtgctgcgattacaggcgtgagccaccacgctcggccagaattttctaatccataacatcgggttaagaaaaggtacagaattgtgtttccttctcttaacttttcagataatatccctattatttatgatgaaaaactgaggttcaaaaatgttatttatgtaggctcattgtttataagatagagataggatttaaaagtatatctttccaggcagtatttgaggactacgtctgagaattggcctttctgcgaaataacatcctttttaaatgaaaataccatcctttttaagatgaaaatacctatgctattttttctctgctgtagtttttcttaattaaaattgtgtgtgtatgttttaattaatgcttatattaaactgtctttattttcagactcttagggttcctctcagtttgaagtattcctgcccttctgaaagcacatggaaactagcagtatcctctctcctcagagttctttctattgggctacctgttgcccggcagcatgcttcttctggaaaatttgacagtatgtggccagaactagccaatacttttgaagattttctctttactaaaaggtcagctcattcatttttaaaattaagacaagaagtggcacattatatcttcagttgctctaaaaacagttgtctttattcattaacaaagtaattgattataaaggttgctagattgtattaaaaacacacctgaattagccatttatccattgggtacattatccatgaacaatggagatttttgctttttgtatttttgcttataagacaggaatattatatataaaacaatacaaatgcatcatatttaagaattttaacttaataaaactaagaagattcagtttttaatttgatgcccattgggcattgcaagagaaaaacaatgttagaaaatcagtgtattaccagaataaataggatgagtggcaatataatgatcagctctttaagatgtttagatttgtcaaagattaacaattttcattgtatggtatctaatttaaagcttgtatttaggatgctatttcaacccctcactgaactacttactgtaggatgattggaacacagactacattttttgaatgaagaatttgctgaggtccatctagagttgtgctattcagtacagtagcaattgctagttacaaatgactaattaaaaccaaactttaaataaaattaaaattttcttcagtctctctaggcatgttttaagtactcattgccacgggtgactagcagctgccacactgggtagagcagattattggacatttccatcatcacagaaagttgtgttgggcaggacagatttaaagcgtgcccttttactaaatgtggacttgtctgtaatagctgtaatagccaggcagtgtttaatccttctagcacaagtaattatcgtttgtgttacattggtgaaattcttttctgagacagagccttgctttgttgcccagacccaagtgcagcagtgtgatcacagctcactgcagcctcgacctcccaggctcaagcaatcctctcacctcagcctcctgagtagctgggaccacaagtgcacaccaccacacctggctaattttaaaattttttgtagagatggagggtctcactgtgttgcctaggtgtcttgaactaacttctgggctcaagtgatcctcccacttcggcttcacaaagtgctgggattacaggcatgagccactgtgcctggccaattttttaaatgtttgtatccatcaatcattttttgatattgtagaatgataccgtgtactgctaaataaccatttaacattattagtttgaagccacttaaattatggatttgatgtacttgaagaaaaaaactacattggcatatggataatgattgagtcccccacagaatgaattaactgaaaaaaattttctttactattctaatatggtttagttattcagtaaaaaaaatttctagggtgcagaagattaacttgcattttcccagtaaaagtttgtcttatagttcagaatttaaaataataacaggtgatcctaatttctgtcttgcaagtggtcagactttgttttgtagtttatgtatttttcacttctagaaatgttattgataccaatgtaagcatactctgtttctgaaggaaaaattataggcgctcataaactatattcaaacaaattatgttttcatctttaaaataactctgaaaatttgagttccttcgtagacataagagcctgagtcactgttaatttgtatcaagcacataggttgagaaatttacatttttccttttattttctaattgtctatatatgcttaatgcccccattaacaaattgaataagctttcagatcagctttttttttttttttgcaatgagtaaaacttctttaagtattgctttccctagcaaggtgtggtgacacacctgtaatcccagctactttgggaggctgaggtgggaggattgccgaggcccaggagtcaaatccagcctgagcaacatagcaagatcctgtatataaaaaaaaatggttttctatgtaaaataataatattttatataattttgtattaatgcagttgtagtataatttcatttaaaattttagctctaaatttggaggtttttttttgcttgtttttgtttttcttgagagtttttctgccatcttccttattcttgaatttcttattaaatattcttcactttctggactttattcttattttattaaatcccgttttctgaagttttttaatatagaaaagtggacactggaaccaaaggccaaataatagtattttacataattttgtatcaatgcagttgtagtataatttcatttaaaatattttgcctgattatggctctacttaccttaaaggtttgagtatgtttggtgtgttggaaaatacattacttaagaagcagccagcatagtggataagagcattggcttggcaaccagactacctggattcaaatcccagtagtactactttgtactactttttagacaagttattaaacctttcagtgactcatttttcctcatctgttaaatgtcaataataatgctccctaacttacagggttattgtgaggattaaatcacttaaaatgaatgaatgcttagaatagcacctggcatgtaagtactttaaaatgcttgtttccactattattgtcattaatgttttttctttcttttaaaaaaggtgacattatccatattaattcccatgaaacaactattattttaaaccaaaattctaaaggccaaaactctaaatgactgagacttggaaatttagctctaaatttggaggtttttgtttgtttttgtttttcttgagacagtgtctcgctctgtcacccaggctggagtgaagtcgcatgttcatggctcactgcggccttgacctcctggcctcaggtgattctcccacctcagcctctcttgtagctcggactataggcatgcaccaccacacccagctaatttttgtattttttttgtagagatgggattttgccatgttgcccaggcttggagttatttttaatggctaaaaataataaagcttctaaattcagctctcaagtaacacagtatcagtattctaagttatggttattctagttacagatttaagctttctactccatggagtagttgatgaacaccctagattgagagtcaggagacctgtgacctggtcctgacttgctgtctactttctgttgatcgtgagctggtcctttcccatcactaggcattattttctttatttgaaagacaaaaagaaggccaaccggagtacgtaatcccagcattttgtgaggccaagttgggtggattgcttgggcccaggagttcaagaccagcctgggcaacatagtgagactccgcctctacaaaaaaatttaaaaattagccagatatggtggcatgtgcctgtagtcccagctacttgggatgctgaggtgggatgatcacttgagcccaggaggttgagattgcagtgagctgtgactgtgccactgcactccagcctgggcaacagagtgagaccctgtctcaacaaagaaagatgaaaagttatttgttggagtaattgtaaaggtccatgaatgtttaatcatggacagcttatactggataaagccagtttagtttttgtttcatagttcaaaaatactttaaggctcaaattgaaagcttttattggtcagttgatactaaaagtgcagtgttaagagaacttaaaaaccatgcacattttcagtttcataacaggttttctctttgtttttattttctaaataattgataactttggaggtcataaacttttagattttaaaccttacttaatgccacatatgtactatgttctatagctgaagtttatcagtagtgtttgaacagtaggaagattgttttggaaagttgcttggaatagcaagacttaatgaatttaaataagactaatacttgattattttttatattggtacctttataaatcctttaacctaattaatacatactctaagactttaagaataaacatatctctgtctgtaatattccccaaactttttgatctgcaagatgctttggcaagggaatacaataacacagaaaatacaaataaaatgaactagcagaaaagaaagcctttgcatgtcgttgagggctataagtaaacagtttaagagaaagaaaaagacaaagttgaaaaacacaaggactgcaatttggtagacacttgaagtctattagaaattcatttagccaactttgagtaccaaaacatggtagttataaaggagacacaatgggtgagtgggaagttacacaatctgtggaccttatattaaaaatcacaaagtactgtgcaaaagaattgaaaacacatgtttacacaaaaacttgtacactaatgttcatagcagtgttattcatagtagcaaaaaagtgaaattgaatgtaatatattcaatattcaatatattgaatgtaatatagtagcaaaaaagacaaattgaatgtaatgtattcatacagtggaacattattcagccataaaaaagaatgaagtgctaatgcatgctcaaacatggatgaacatttacaacataatgctaagcggaagaaactagacacaaaaggctatatattgtatgatcttgtttatgggatatatccagagtaacaaatccatagagacaaagtagatttatggttcccaggagttgaggggaagggagatgagggagagtgactgctaatgggtacagatctttttgggggggtgatcaaaatgttctggaattagaaatggtgatggttgtacaactttatgaatatactaaggaacactaaattgtatattttaaaagggtgaattttataatatatagattatattgcaacaaaaattttaatatgtcatacagagagaactgacaaaatacaaataacactttataagtttgaaggctcttttttattttaaataaagattcatgaaaataaatttttaaagattactgtagttttcaaatttaaggaatttaagatcttacatggcttatttgtaacctgcagtattgaccattgccccttataatttataggtaaattctgttagtcagcatttttaaaagctcaatcgatgtttttgatatgtttgctagttataaattaaataactattagttatccagtttttagttttgtatgctactctcttccctcatcatatgatattttaaaaatctagttcagtgtttctgatatatgatccaaatagtattaatattattaatgtgttgaaataaacacactaatacaccttagcacacagtatacacactaaaagtattaatattgttagtgtgtatatttctataaacactaataatatagaaatatacacactaataatattaatattattttattatttttgcctcttcattttttgttgatcatcaactcatccttagttacctccaccatcatcacaaatcttttaatattactaaacccttaccttccttggttataaattaaaattaaacacaacttttgtctctagagatgcagatatagtctgtgaagctgctttgatggcagtgattgtgaaattcctctgattggttcaggtttgggtaaatttctttcagtttttttactctagttcctactaccaatttatagttagcttaggacttggacaccagaatctaagttctatgagaaatggactgagtctgtcctgttcacagctagatcttgaacacccaagaatataatacctgatgcaaagtagttggtactcagtagatatttgttgaatgaaaaatgtccaaatcaaagaaaccacagtctgatgcccatatattcctatatacaaaattgtacattatacttaatatacagaagtgtatattaaacctaaatgttctaatactatttttacatctacaacataaaaaagaataatgtaggctcaaatatcagataaatctaggttgagattgtggcctcatcatttacttaaagtgtgttcttgggcatattagtaggcattctaagtttcagttccctcttctcttgattatataataattactacatggaattgctatgggagattaatacaaataaagctcatagtactgtggctgtctaactttttagctgtcattattctaacagttattactatcctattctcaactgtttttaaatagtatcttgctgttttttaactttatgtccattttactgttcactcttatgagccacagagtctggaatccaccttggttctctcagaactattgattttctttgttcttgttggaacaattttctgctttagaaaatctgcatcagtcttcttctttacagattttccctctttattgtaaagatctttaatccattgtatttattacaaattaatgattaatggactgtctctgagtgaataattcagcagctgaactaaggctgtcttaaataaccaccaatataagtgaattcaggtaacaccacaatggtaacttttgctctgctgcagatgatagctctttacctttcgttgttttttcattcataatattgaaataagtttagttctacagattttatttagttcaagattggacctagtgtttttgtagttagagtatcatgtttgtaattagcttagtcatttaaactaatgactttaatttacaacattactcttttaaataaataataatgccccaacctgggttggaagacataattttttgacatttgaatactgtttttctattttgtttgtatttgcagggaatattttatctttaaaaatcaagtgtttttttttttttagcatacctccagataatctctctattcaagagtttcaaagaaatgaaaatattgatgtcgaggtaaggaggctatttaaaatgttttcctgtgaccatttttgaaaccaaatagtaaaaatgtttgaactatacagttgctgaaagaataaagtaataggttaagattaaaactgaaagcattaaaactcttacaggttaaacgttgatgtttaaaggactggcattttaaaagtgacttccttagatttgttacagtcttgtgctttgtgcgtgttgtcccaatacttagttgtgttcatttaataagtttaaaaagagtttattcgatgaaataaatccatcagtcaggaggcatatatttgagagcttactctgcagtttgacataccagatgtttctggttcaaattaatcagaaagttgcttgaatttttcagtttttaatcagctgtatatacagcctatggaattcttaaagcaaatagtgttttttaaagaatatattttgaggctgggaactgtgactcgtacttgtaatcctagtgctttgagaggctgaggcaggaggattgcttgagaccaggagtttgagaccagcctaggcaacatagcaagacaccatctctacaaaaaaaaaaaagttttttaagttaattgggcatggtggttcacacctgtagtcctagtttctcgggagactgaagtgagaggatcacttgagctcaggagttggaggctgcagtgagctacagctgtaccactgtgcttcagcctgggcaacagagcaagaccctgtctctgaaaaaaaaaagtaaaaaaaataagtaaaaaagtaagaaatatgttttgaggattataaatggaatttaaataagcagttcttgtggttgtggatttttttgttgatggtagggttttggtggtttttttcctttaagtgggatagaggaacttttaagtaaataaaatcaattacattactttaaaatatacatttggccgggcgcggtggctcacacctgtaatctcagcactttgggaggtggaggcaggcagaccatgaggtcaggagattgagaccatcctggttaacatggtgaaaccccgtctctactaaaaaaaaaaaaaaaaattagctgggcgtggtggtgggcccctgtagtcccagctacttgggaggctgaggcaggggaatggcgtgagcctgggaggcggagcttgcagtgagccgagatcacgccactgcactgcagcctgggtgacagagcaagactccatttcaaaataaataaataaataaaatatacatttaaaatgcataggcattatcatatggaaacaaaatattgcctttcgtgccattactgtattaaagctcttgtggactttaaagggcaaaataacatactacatgttagagataaactatttgacaaaaatgaatataactttaatttctcttacagctgatagtttttggttataaaaagtgatttaaatgttattcttaatcctattttgaatattttaattctaacatgggtaaatttcatatgctatttttctctagagccctatttgcagttatcatgctgaagatcaacatttgtccaaatggttggcatagtaaacagttatggtactgactattttgtattaaagttactaggacagatgagagaaacagattagtagtcattctgtatgttaacattaaaatgtttgtgtacttctttaaaggagagttctttaactgattttcatttaaagtaaaatttaaattttactctagaaattattttagtctctttcaaagaaaacaatacatttgcatttgcctcttttgttttaggtagttcaacttatcagcaatgagatactaccttatgccaattttattcctaaggaatttgttggtcaaataatgacaatgcttaacaagggctcaatacattctcagtcatcttcatttacaggtatgttaatttttttaagtattaaaaagtattgaagtacttttgaagaaactgtcagtagaaatgtttaatcctatgattttggtaatgtaaactggagaatggtaaggtgatttttaggattgtaatatagaactaagctttatgaggagaaatgttatgacatgactattctgtggaatagaatgtttttattccatgtttctattctgtgaaatactgtgtttctgatcatatatcagaaacactgaactaaattttttaaatatcataactgcaaactgtgaagaattaaattgcaaagcactttatggaatccatggatgtcactgcaggctgacagaagttaccagttttgtgaagtcatagattggaaaggaatataaaaatatgaatgtatattctgccacttagcagtcaattaacttttgagtctcagttttgtaatctttaaaatggagatattaataccatcttctcaggactataaattacagagttcatttaaaaaaataagatgcctcaacattttttaagggaattaacatttactcagtgccaactatgtacaagatactatgctagaatgttatattatttctcacaacatttctgtgaggataggtaagaccatattacaggaaagaaaattgatttagaaaggttgaaaaaattgctcacaatcttagggctagaggccaaattcatgcttaaaaagaactacatgcttcttttcattatatcatgctgccttaattgggaactgatatataaattactgtttgttattaattctctttttgtaaacctgagctcaagtcttaaactgtggcatcagccaggtgcagtgattcatgcccataatcctagtgttctgggatcgctaggtgggatcccaaggtgggaggatcgcttgaggccagtagtttgagaccagcctgggcagcacagtgagactgcctctgtctctacaaaagattttaaaattagctgggcatggtgacacatgcctgtagtcctagatactcgggtggctgaagtgggatggcttgagcccaggaggccgaggtgacggagttatgattgtaccactgcattttagagtgcactctgggcaacagagcaagactcttgtctcatatatatgtatatatgatttaaaaactacattttgggaggccgagacgggcagatcacttaaggtcaggagttcaagaccagcctggccaacacggtgaaaccctgtctccactaaaaataattagccaggtgtgatggcatttgtctgttatcccagctacacaggaggctgaggcaggaaaattgcttgattcgggaagcggaggttgcagtgagccaggatcacactactgcactccagcctgggcgacagagcgagactgtctcaaaaacaaaaaagaaaaaagaaactgtaaatttgtgccatgcagatccttaatcctcagaatttactagagccttaactagcttctcctattttgtgctgagcattttaaagagcatttatgtgtacagtttgaccactagatgtctctcatactgctcacttcacatactagttcttttttctagcccaaacagtttttaaaactggcctggtaaagtgtgggtttagcaaacatgagaatctcggggaaaattttaaaccccgcttatcttaatgtagccaactttttattattaagagtatgtgaaaatatttaacttttaataaaatacacattaagaacaatattcacaattaggtataaatgtccaaagttaaataagggctattgagttaccaagtatacttttactggcagttttctgataatatatcttgctatgtatagtattaaatttaccaagacaagaaaggtgcatggacattctttcagtgactttgccatatgacacatgtcttctcagcactaacttggagttttccaacacctgggaagcttcacgtgagagtccttcaccaccacaacaatgctcctgctcattcctctcatcagacaagggcaattttgtaagagtttcagtgggaaatcattaggcatccactttacagttgtaatttggctctttttgttttctttttgtttcggatcttaaaataccattgaaggacagcctttttcttcagtcaataatgtaaaaaagacagcattgacatggttaaattcccaggacctcagttttttacagataaactaaatggctggtatcatcgcttacaaaagtgtcttgaacttgattgagcttatgttgaaaaataaagtttgtagttttcattaaaaaaaaaaaacttagagttttccttaaacatatacatacaaaacttttatttgctaaacaaggccaacctgtaaacacagaggttccagtgatgattggccttttgcttttaagtatgatctgatagtcagagctcacagacatttgaggaaattctctaacaccaaagagaaagaccaaaacaaatgaagagagagtaaaagaaattggaaggaaacagataaaatgcagagtcactgaaaacataaaaccagttaggatgatcaaagagataaaagaacaatttaaaaaatgctacataaaaggagcagtagaaaaagaaagaaggctgggcacggtggctcaggcctgtattcccagcatttgggaggccgaggcaggaggatcacttgagcccaggagtttgagacaagcctgggcaacatggcaaaaccccatctctacaaaaaatacaaatgttagctgggtgaggtagtttatgactgtagtcccagttacttgggaggctgaggtgggaggatcacctgagcccaggagaacaaggctgcaatgagctgtgatcacaccactgcactccagcctaggtgacagactagagactctgtctcaaaaacaaaaaaaacaagacgagaaagaactcatagaaactaaagatgtggagttcagtgaaaggtagaaaggagaagtaaaatgaatccagggagcctaacatctgacaaagagagaacaaagaaaatctaggagaaggaattatcaaagaaataaactgaagaactgaagaacaaaacttccagattaaaaatagtcagtatcaaaaacagtgaaagaaaaaagacccaaatcaggcatgtcattatgaaatatcagaatacctgggataaagagaagaccctaaaagatttcagaaagaaagaaaaaaagttcagtataaaagacattggaggccaggcacagtggctcatgcctgtaatcccagcactatgggaggctgagatgggtggatcacttgaagtcaagagttcgagactgtcctggccaacacagtgaaaccctgtctctactaaaaaaaaaaaaaaaatacaaaaattagccaggtgtggtggtgcgtgcctgtaatcccagctactcgggagtttgaggtgggaggatcatttgaacctgggaggtggaggttgcagtaagctgagatcatgccactgcactccagcctgggtgacagagtgaagaccctgtctcaaaaaaaaaaaaaacaaaaaaaaaaaacagacagtggaattctcagacgcagtattggatgctaaaagacattgaagcagtggttttagagttgtaaatggaaaggacttttaacatggaagctccatgttaaaactcatactgttggccaagtatgagtgtaaaacagtaattctccaatttcagcatgcatcctaatcaaccagaggacaagcaattgctgagttgtaccccctgaatttctgattcagtaagactgggaggcatgtgaatttacatttctaacaagttctctggtaatgctgatgctgcagggtacatttttgagtaccataatatatgacattttcggaggtacatgcgctcaaaagttttacttctcattgattgtttcttaggaagctacttcaaaatatgctctgtaaaagcaaagtagtaaaccaaggaaaaataaggcatgaggctgggtgccatggctcacgcctgtaatctcagcactttgggaagccaaggctggcggatcacgaggtcaggaaatcgagaccatcctggctaacacagtgaaacactgtctctactaaaaatacaaaaaattagctgggtgtggtggcacgtgcctgtagtcccagctattcaggaggctgaggcaggagaattgcttgaacccaggaggcagaggttgcggtgagccaagattacaccactgcactcctgcctgggcaacaagatgagactctgtctcaacaaaaaaaaaaaaaaaaaaaaaaaggagatcttggaagtgggatctaacttgagagaatggaaacaatttccagagtgatggcaaagactagtttcaggatataacagaacagcgtgtctagagagcaactgccggactggagcagaggtcacgttccaggaaagaagttgctaggagagggaaaaagagagaaaaagagaatactgcaagtttgaccacatgaaaaactattgtgaagtatattttacagtgctgttttatggtatagaaagaccaaatcaagaaatatgttgaatagaagtgatgaggatcttgccctgtttttgatcttgtgagggggaatttgtttctctctacatgcgcacacacacacacacacacacacacacacacacacacacaaaacaaaaaaaaacaaaaaaaaaacacattttcactatatgtatgctattagctataggttgttctaggtgcctttcaccagattgaggaatttctctctattcctagtttgctaagcattgttatcattaaagctcattgatttaacttctattaaccatcaaaatttgttaattttacagaagcagagattgatattcgtttgagagaggaattttctaaaatgtgttttgaaacattactccagttttccttcagtaataaagtcacaacacctcaagaaggctacatctcacgaatggcactctcagtgcttttaaagaggtcccaagatgtactacatcgctatatagaggatgaaagattaagtggtaaatgccctcttccaaggtatatatttcattttattaaagaaataaatgtattgttgtactaattgttgataacaaggaaaactctgaaaagcaagtgtttttgtaagtgatctgaactaagctgaagttgtttataatcttatttatcccatatggtgtaaatattcacaggttttcctgcagatatattaacatgttttgttatggggtgcttttttagatccctcatggagattatgtaacatatgatacataggtaccaaattacctttttgaattaaaaaaaaataaactgaattccaaaatatatcttcttccagagatttctggataagtacttgtggatctctatgagcacatgatattatttctctaaagtgaaaatcataaatcatattttaggaatatcctagtttgttttacagtcatttgcaggtttctctctgtgtcagctagcctgatcttaggtcttcttttcatccaatctgcttagttaagcccatggacctaaactgatttatttctcatctgttcagcctgtgtcagtggaaggtgcactaggcttttctgatcagccaaggctaatcagagttggagtacagaccagaattcaacaaaggatacagtcataaattagggttaggtttgcaaatacttttataatgtggaaattagagtttaaggcataactaatgaagcaaacagaaaataacatgggaaaacaaagttatcaaagtcaggaaagacgaaaatcattgttcccgtctcataaggtaggactggagaggcaaatcaccagtgttaaatctttgtgcacattttaatttacttataataaatttctgaagttggaattgacctgtcaaaaggcacagacattttatagcttttgatatgcattaaccaaatttcccaacagagatttataccaatttacattctcccaggaatgtgtgaatgtccctttcctcaatttttagcatttttaaattatttgccagtttatcatttatctttttctaatttgatgaatgaaaaatagtcatgtggtactttgctttcattttttaattaccaatgcatattagctatttgtatttcttcttttaggatccagtgtattttgaatttctagaacttaaattataactccttatactcaaatttatacacaaaaacactccaaagacagatgttagtaatttggctatgggcatgattgaaaattgatttctgaagtatacttggaaatgtggtaataaggttgttttgagtggaatattgttagaacatatttatatattataaaatattatttgatttcagaagaaaactttcaccttattttttaatgttctaagtctttactttttaactactacctttaaattgagccttatttataattgtcctatgaagttatattgtatcattctgtgtttgttgcagtatcatttaattgttttgtaaaaagctacattgcaacacaataaaatacttcaatgcttacaataggaagtcttgaaatagtatcctgacatggtattagaaagtcttatctgcagaataacacaaatgcacaccaggaatggggagggatgagggcggaccagagaccagaagagctttgtttttatgaggagaaagaagggaatcacgctactcttgttgactctttactccaagttcattcttcattgctaatgtctccaaatagtgctaccttaggattgatttccagaatgtttcttgtttgtattattagaaagttaaataagtaccattgtaattttgaatatactttcaacagcatggtagaatatatgccatgtggtaatagtagtctttgtttccatttaagctttggcaaatctcttttagtactaattagtttaaaaaaaaaaaaacttgtagagaagttttaaaagcatgtattataaaatgttttaagggcagggcacagtggctcatgcctgtaatcccagcactttaggaggccgaggcaggaggatcacttggcagggggatcacttgagcccaggagttcgagaccagcatgggcagcatagcaagcaagaccttgtttctactttaaaaaaaaaaaaaaattagccagacaatgtggcatgcccctgtagtcccagctactcgggaggctaagtgggaggatcacttgagcgcaagtcaaggctgcagtgagctgtgatctcaccattgcactccagtctaagtgacagagcaagaccctgtctcaaaaaatcaataaataaaaataaaacgttttaattttaagtagttatgtgaaatatcttacaaataaatttaatttttcaggagtagattgccccacctctttattaattgataagtcatggcaagaataactacaaatttgatttgcacactgaagtacatataaataaaatgatttttacttttatatgaatttaaaactaacattaaccttgcattgtattgtgttcagtatttttcaaaagttcatctatttgtacaaacttagtttaaaaaacaaacatacctggcaactttaaaatcttaatggaaatgatttcctatctctttttcaggcaacaagtaacagaaattatatttgttttaaaagcagtcagtactcttattgattcacttaagaaaactcagcctgagaatggtaagtgcttagaaacagttattctaaattcgtaacatttatgttctatttgtgatggacttttgtctgttaatttaactgaattataggaacatagcagtcattagacttcttttctccagttctcatgacaacaaagcatcaagtccattaggatgtcaattaagtaaaattaatttgtgatgttttcattttttatgaagcagtctaccttacttttttttttttactatattgttctgaagtcaggttattgcaagaataatccatatttcatatatttttaatgtagaagataattgacttatttggggacaggtggaaaagggctttatcatctattcgtactgatttactttgcagatacaaactgtataaataactttgaatcatttttaccattctttctcatttgtttgccctttctgttgttcattcctgtccagtccattctttacatgatagccggaaatgatttttccatagtagggctttgatcatttatttcctcatcctcccaaagcaaaaaaatatttttcatttaccgtttcctaccaaattgcaaagaatactccagtctgactccattctagtcacactttatttcccacaatagatttcatttcccctactctgcactaaactaaaattctcaatcttcccaaattttttcaaccttttgtttatttcattatccagcttgtatcagcctatttggaataccaccctacttttaaaccttgtttttaatctcttaaaggtaaataatttttcttttcattgaatgcaaagcttttttatgtgtacttgtctcgaagcactctatttgtattacaattatgcatgtacatgactcatctccctttacattgttaagatttttgaggggcttttcagaccatgttttgttctattttgaatcctctacaacattgcttttcaaagtatggtttgttggaccagccattgattggcttcaacagttttgttactggtctgggacaagatagtgagctggcatcagaatataaatcagatgtgtcactaaacacactgcttggttcagctgacttttttttatacaagaagacattggtaaagaagaaaactgtgtgttggtttacattctggcacaagcttcttattttgtagcagattggcaccttaaggagcattacttttaatatccaagaaaaaagtagattcctagtaaattactaatgaatgagttgtaggatatttgttcctgtcaactattatataagtggagtaaatacatatttttcttttgttaaaattcacccattggtactttggcctagaaagggtattatactaaatcttaagaggcagtacacttgtctttattcaacccaaagggatggatggaatttctaagaaaaagcctggggcagtgtcctgaatttatcccattagagttcagatttgggttttcttcaaaaagtgtcctgggctggcacagtggctcacacctgtaatcccaacactttgggagcctgaggtgggaggattgcttgagcctaggagtctgagaccatcctggacagtgtagtcagaccccatctttaaaaaaaaaaaaaaaaaaaagaaccagaatgtgtataaagggagaaaaggaagcaaaaactcagtaactcttttttacaaagccaataggttatatgtataaggcagtgtagtaatagatgatctaactaaatgaatgttaaaaaattgttgaatggagtttgaattatgtctctgggtctatgaagtgaaaatttaaattgaatgtaaacatataagatgatataacattttagaaagctgtggtaagctttattaagaaaaagaatgacttcattatttgttttggggctttttagtgagagaagatgcatttgttagacttatttttgtttggggagattttttggtttttgtcttttttgagacaggctcttgctctgtcgcccaggctagtgtgcagtggtgtgatctgtgcttactgcggcgttgacctcctgggctcaagcgatcctcccgtcttagcctcccaagtagctgggactgcagatacgtgccaccacactctgctaattgttttgtattttcagtagagatagggtcttgccatgttggccaggctggtctgatacttctgagctcaagcagtctgcccaccttggcctccgaaagtgctgggattgcaggcatgaacaaccgccccccagccaagattttgttttcatcattttacttgatctttatttaaaattttaaataggtagtatacatatacatggtccaaaaatccaaaactgtaaaatgatatacaggggaaagttttaatatgatcttttccttattctctatctgcccagttcttactttaccacagacaaccatttttattagtttgtggatccctccagaagtttattatctaaatacaaagtacatattctaatactcccccatcccggttttgtacacaaatgaatatttgtacacaatgaattttgtacacaaatgaatatttagacagagtcttgttctgttgcccaggctggagtgcagtggtgctatctcagctcactgaaacctccgcctcctaggtttaaacgattctccagcctcagcctcccaagtagctgggaccaccacgtctggctaatttttgtatttttagtagagatggggtttcaccatgttggccaggcctgacctcaggtgatccacccgccttggcctcccaaagtgctggaattacaggcgtgagccaccacgccagcctaaaacatattttaatttaagaaatttgagttgcttcctttgagtttaagatgtcatcataacatacttttgtgttttaccgtaataaactgagggttaatttggtcaattgactctccatctgggacaacctagacaggtttcaatctatctaatcttttgttaaatgattagtgtaaagtttcacaggagacaactgaagcagaatttttaaaacttcttagacagtggctttttgacttttgtattctgttaagcagcaaaattctttttacaaatgaaatgtgatgtgaattcccaacatattaaaacagagaaaagcagaacagctccagcctgactcctcaccctcagcaatacccatcagctctattccccatttcttcttatcacacccaccctgaggaagcccctgtttggggaaaaaggttaaattaacagtatagcatttttccaagatatgtactaaggcatgaacattgatgatgtttgatgtcagtaggtattggatggaaaaaaaatccataattaagggaacactgggttaaagttaaatttgttcttttactacaagcccttaataaattgatatgaagaattagtctccaaaaggtgagagatatgaaacatctgccaaactactttatcatgagctttttcctaagaagtaaattgaggaacactagtttgagaaacacatttctttattttacagtggaagaagtaagataaagagcaattaaatgacttgaccagggacacccatcattgccttatttcagaaagaattttaggcaattgacacccagtaaattgtagtgaaaaacagaatcaaagctctctacacatagtatttatttttctttaatactataatgcctcttagatttgagacttgtttcacaaaattttaaaaatacctaaaagtctaaaaaaaatcttgcatattgggtgcccaacattatgcacaatacttataggaaaatataactaattgggatataacacttttgtcctttcagtagcaatagcatttagctgtactatttgttcatgatagtggtgaagaagccagacatggttcctccccactcaagtctacatctaatgatatacattaaagattagcaaacagtaaaagacaagaatggatctgtttgtgacagtttgtaattaaaaggaatatcaaggatattactgggaaaatcattaaacatattttgtatttcaaaagatttctacttttagcagacaactgaaaaagttattttctaattcttgaaatgtacactacatcctctcgcaattatattaaaaatgacaaaggtttggattgttctgaattgctttgttagctttcagagccttcacaaattgaaataccatttaaaatgtactttatcaaatttattgttactgatgactgcacactgagcatatattttttcccataccttattaaatatagcaggaaatctttgaaaaattaaaaagataaaaagatacaagcttgtagaatcttcatgtttcagagttttttctttacatgcagtttaaaggattgtgttcatgttaattgaataatctctatttaattccacccttttgaggttttatacttttgcattacagttgatggaaatacctgggcacaagtaattgccttatacccaactttagtagaatgcatcacctgttcttcttcagaagtctgttctgcacttaaagaggcactagttccttttaaggatttcatgcagccaccagcatccagagttcaaaatggagaatcttgaccggctacaatatatttgaaagcaggaagatagtctaaaaaatgtttgctcctaattgagtcttctgtgagaaggacatttcttactgcaaataattcttggcagctgttgttggcctcctttaaattctacttacctgagttcagtaattcatattacaggcttgcacatcaacaaaggctcctgaatgaacagcagtgtaaggctttaataaattaaactgatgggagggataattaacactacagtatacatgctaccatatctccagttggtgatttaaagtgagcttatgtacagtttgtggtgtatgtgttaatgatgtactttttaaaaagaaagaagagatatttcaattcagtcagatttattagtctggtgtttttgcaccctttttcaagtacaaaatcgtactagaattttatgcaagatggtactgtaacattccatattatctataaccagcctttgttaacaaagggaactgatatacttgtgtgtataataaatggtacagttctgtataaaatagtgcatttatttaaattttaaaagtattgataatgttaaatgcttaaagctctatttattattaatacaaaattgtttgcttacatttttacttataatttgccttcatatgtggcggataagctcaccatatgatcatgcagttagcttcatgcttattttaaatgtattattagtgaccattaaacatctgaccagtaaggtcatgtgaacacagcagcaaatagtttatgatttgctgattttggagctttgaaatataggttcttaatacattgatacatattgtagcactatgacttcatcatacctcatttctttaaacagctctccaagctttcactgaagtctgtctgttttttatattggctgtctggattttaaagacttttcatattttatatttctactgattttgtttcccctaacaacatttgtcactgtctttgaattatgacccaggcaagatgatttcagattttctaaaatcttgcctgtgaggttttgttcatatcagtgcttcattttgtaatgtcttctcaagaaaaatacctatgttaactcacaagtataaaatatgtgtgtattataaaacaatgaaaagtgtatttttggagatagtcaagcatttagaagtgcagtgaacttgctgtcacggagtaaaatgctaattatgtttcactttcctagcctagtgaaaaagaaaagtgctcttgagtacaataccttaattatttcttaaaatactgactttgacctagctcactgtattttttatttaatggattatggattacagtatttttcttctgagttaaattttcataatttatgtgaagacacaaagatgtttaaaacaatgattattcataagaaatcatgatggtctcagtattattttagtgtattggaaggtctttgatcttaatagaatttataaatttcagcttctccagaataatcataaaactgcaaaaagatattataattgagtcatgattgagatacagttttgaggctattataattgtataattatttaatttgcattatctgtaaaatgtagtaaggtctttgaggggatattttttatttacatgaattactgaatttctattttattatttcacctaaaattaaggtaaaatatggcatttcataagttctgctttcagcattttccttaaagttgtaaaaaatcaagctatgtacttattttctatatttaggtgtgttaaattgaggattagaaaaatccacataatcactgataaagcattgaaacagaataacccaagggtagtgtaccgattcagtaacatgttaaaaatattgctatgcatttattcaaaggaaaatggtctgttcttgagaaataaaagatcagttgcaattaggataattaaatagttaaatatgagtcaagtgtatgcaatatacatttatatgaaccaaagcttgctttatcaggaccatgccctacagttcaaaacataaacatagtgaatgtgttaatatcatataataaggtaataaatgccagtcttagtgtgaagcaagtgggtggcccccttggtagtataattggacaggattttcctccagaatatttcctgtcaccctccaagagtcactacagtaattgattgctggcatggaacacattgcccttgtcttgttagtatgaattgggttctccagtgactagaagaactggggtgtgtgaaagtattcgatgccaggagattcaaaaaggaagctctcaaagataagatcattttatggcacaattgagtctataaccagccctttaagcagtagtaaaaatgtcctttgtcatacttactagaaatactatgagttttttttttttttttcatttgagacggagtctcgctctgtcacccaggctggaatgcagtggcacgatcttggctcactgcaacctctgcttcccgggttcaagcagtttcctgcttcagacttccaagtagctgggattacagacatgccaccatgccaggctaatttttttaatatttttagtagagatggggtttcaccattttggccattctagtcttgaactcctgacctcaggtgatctgcccgccttggcctcccaaagtgctgacattacaggcctgagccactgcgcccagccaataccatgagttttaagcctcacatcgtcacttgctgtcactgccagtgcctgttttattcatattgctggacaacagacatatgccaccaattgtatgattaataaagtctttttctggccattttgtccattataaaggaaataaactaattgttaacttgcatagattacttcttagtttcctatgctaccaccactgccaagggagaaaaaaatacatcattttgtaatgtctttagtatttctttataactagtgttaaggttttgttaattttattgtatacatttgtaacatttattaggagccttttaggttccaaaacaaacaaaaggcataaaaaagtctagcttagaaccacttttcacttgctttcatttttaattttattcacttaacagctaacatctttcttgtttcttgttttttccattatatggttatcgattcaactcttgctatattccttaaatttgtatgtatcatcagaagaaagagatgaacaatttagtgtagatattttattctggagaataatattcaattaaattatttctacagcaggccagtaacaactagattatttgtcctttctcagtataattttaaagagcattttgttttattgtcacaatttggtaccactagtcccaggtaaccattgggccaaaggatcagttgagaaacagttaaggatgaattagcataagttatggaacagtgttagaaaacaactcaaaagtatattctttattaatgaggtggtcattattacatttgtgtcaatgaagggcagtgtagttattttaaaatgactaatattttctccccaaatacagaataattcagatgggcaaccaagttttcaagagactgctgtaggtgaagtctgtctagccaaggcagaacacttacaggagtccctaactgtgccacccttggaatgggttagtgtacaggctcagaatattgtggattacagtttttcagagaaaactaccacagatgtagacaaaaatgatctctgaaagcattgccagcagccaggtatgttccttagatttccacttaggtttggcattttggcagataagctaatcttgtataaagcatcacattttactatgcttagtgttcctgggttgtatttatctacattattagagggaatttttattttaaaaaaattgtcattcatgagaagaatgggagttcatgccacatagtattttaccaatttatataaagtgggaaaagtctttaatacttcatgatcacttgaattaaagtttttgtatctctggaaagtagaatagtgctttcatttgaatgaaaagtgtttatagattcagaaagagagatgatatctttgtatcttgatttatatacagaccatttcagaggaagttaaatgtcttacaaatccaatactttctaatgctctaacagtgttggctatttaaaagaacatgtggcaagttctatatgaatattcttggtcatctcgactaattctgaggcaatgatggacagagatgctacttcttatttaactctaggcatgttgacttttcaaagcggtttccttatttctaaacagagatgatgatcaatgagttactaattctttagaggaaaaaatgaataatttgagtgtggagttgattttaatgacagggtaattcaagttgtttgataaatttattactatattgtaagagagatctttgaccatttttcttcctttttcttggacatcactttcttccctccccttctctcttttatgtttttatccttgttaaattttatgtttacgttaccatctttcttatactttcccctgatttttctcttttaattcctctttcattctctgcctcttctctttcagctctttctctaattgtgcctattccttgttcataagaagtggagctgttagtggtagaaccactgctcatggttctaccactacaaagtggaaagtagaaatactttgcactttggccactgttgcgtttttgccaaggtaaagttcccctgccattttgaaatagctgaacaagttaaagtaatatgttccaaaaactggaagtgccataaaaaactaaaaataaaaaaaaattgtgactataactcctactgtctttatgaatacacgggattcagcagccaagatgctcacaaaatgggattgctataaatatgatggattcagcacctaaatttggaataatcatgtcttttctgttatgtgggtagagagattatatatcttttctcaaagtaaagtatttaaaacctgtttaaatgagggttttggctggcgtggtggcccacacctgtaatcccagcactttgggaagccaaggtgggagtatcacttgaggccaggagtttgagactagcctagacaacatagcaagatcctatctctagttcaaaaaaatatttttaattagggttttggttttttatgattttggggggtgggggagatatttgtttttttgaggcagacgtttaaacttttagatttatcccatcttaatattgatttatattgacactgcctacttacaagaataatttgaggcagcatattgcccatgtatttcaactattttcatttttctgttgcaaagcagtctttgatggaagacccggaatcttatagttctcatatctgagtctttctggagtgtatttggtgtctgtgtgattggttcacccagaggtcacccagaggtcaattgaaaccttcctaattatactatggtattgattctatcccctcaagtatgaaaaaattaaattttcagaccattttcagttgctgcgaatgtagttacactaagttttattttaaactaaaattcaataaacagtgcagccagggaagatctgctaaaccatgccgttatttggaaaatcattgcaatatattaacaactgcttccttctatgatgtttactagatggagaaaaatactccatacctatattgcaattttatttttatctagaaaaagaaaatattaggcttcagacccaactgtgcaaatttcatttgctttccatctcttactactacctctgtgtcataatttaacacgtaacatacaactcctgtctcttaaggcagctaccatatggtgtttatgtcagactggatatatttatctaattttgtgaaattattttttagttcccaacacaattcttgaaagtaataccactgttgttactctttctccttacaatttttatgttgttgagatgtatcagttatgtattataatcatgaaattgtattggcctcaaacccaaattttctttgtagtctaggatagatttttcatgaaagctatatagttataactgtgattgtacagattgtttatttgttttacagctaacattaagcatgattccaggtttttaattatgttccagcaacactagtgtttctttataacttaaaatcataaccactttgataatttacctttggatctgaccagtgattcatttttttcttgaatatactttgtgtttgctttctcatccccgttaagtctgaaacattattgacaccccacatcacttactctgtttaaagactttacgagtagtgagtcacatgtttaggatgatcactttgggaaaaaaaaaattatagagtaaaggggaaatgttcttgagagctttattaaaaccattaatatataaaatgaaaaaataataaacagaagacacgaagtgtctctcaatagtttagaaagaaagatttggaactttaagtaaaaatgctaggtcaagtaaaaatcctgatgtagattagattatcttaatcttatgagcatttttttttaatttggtgaagctgttttgaaactgcctgtccatatcaatgccagactatctctctacctctcaaagaaaataatttgcattaaaattcctttttttgttatgtaatgaaagtataaaacaagaatttgtacgttactcagtgtgtactgcagtcagatatagttaaaataatttttctgatgcgtaattttaaccaccatttctggagtacctagtatgtgcaggccaaggctttgcctatattattccctttaatcctcaaagtagccttgcaaagaagttattttcattttacagaagagtcaaggattagggggttgaagtgagctgcctagagtcacatacctaaagtccaggtggatcactatgtcttgctttttcaaaagcagttctttctactacagtacaatagtttcatgttttacagtccattaaaatccaagacttataaaataaactaaaaatactcttgaggcaattactatttctatgatgggcactgggacaaatatacttgaacataacaaagaactaaaaatactgtgaaaaaaagatttgtcttaacgatgaccttgaaagttgcattgggtttttattattggtccaggtttaaaacattttatctatttaaaacatatgttgtgtgttttaagaagttatgttataaataacagcattgtggttaaaagcccagagtctggggccaggcttcttagatgcaaatcccaactctgttattttactaaatgtgtgaccttgggcaagttaattaacctgttttggtgtcctcctctgtgaaatggagttaatcgtggtatttaacagaatttaaaatgtagtgtgttctaaagcgctgtgcctggagcatcatcaccactaggtggttagggaagtaaaacacatttggcacacatcattcaagaatggccagaaaatccatgtcttcccacaatagggaccaattttttgcctttcaccagacaaccactgaatgttaagaatctactgtgtgctaataactgtgtccttgctgtatgacagaagctatttggagcgctctcaagtgcttattacagctagtcaaggaaaccgcatatataaaataatactggatacaagactatacaattaaatactggtgtatcactaacaactgtttagaccctgtttttgcgttaagcattgggttagtctctgtcctcatggagttttcagttttatagggaatacagaccttttaacaagtatgtaaagtacagtaaaagacaagtacagattaaaatgaaatcataaaataggaaccttagcctagtcttctgtggttcaggttaatagtgctgttagtagtcagaaggaagttttttaaagaaatgaaaaagctcagtggttaagatagaaattaaagttagtcttgatggctacctagattttggatgagttcaaaggatatacggagggatttcaggcaagataatgtgagcaaggcatatctgtgaaatagaaaacagtgcattttggtgtattgtgtgaaacaaggttggttgtgaaggattgggtcccttcataaaattccttgaaagccaaggagagtagtttagatttgagatggcagggtctggagtgatttaagaataaattataaaaccaaggaagataaacttgcaatcataagcaggataggatatatacagtatggaaagctaagctagaaagctgttgcaattttcttgctatgaggtgatgataaagaattgattaacggtggtcatattcagaaaggatacttaagattcctgatatgcagggaggggggagaaaaagttgatggtaacagtacattatatgtggatgatgagtatattggtgttagcactgttaaaaacattatggaaaggaatgtaagtgataaagtagtataatgactaaatttagttggaaactactgctgtaacaaatctgtataccatagaccaaacaggtgtttagtggccatttaaaaatctgtgccattatggcaaaggacatttgctttggtacagaataatctgatccactgcgcagtcaatgagcagtgagggttgattcccatggcagtccaatctttgcttatcaaggaaggatggtgtgaagtttctacagactttctggtaagtgattgataggtgagtttatggtttgattgagtttttgctttgagtttatgcttagtgattgataggtgagtttatgctttatcaggtaaagcatttaactgcaaatgtattatgtttacacaaatattcttaattggaaatagtttctgaatatgcacctaaaaatgttcttatgaaatatgtcaggcaggctgatttttaacttgaaaacttctactttaagaaattgtttgggtcccatcgcctataccatgtagaatagaaacaaaaagccagttatttaatttttaatttgcaattaaactcttggccaagaggatctgttgtccaaaattacatcgtgatagcttaagaaaaaaaaaatcttactttgccagaaagggaattatacaaggatatctttatgagttgctgccaaattttgttctagaccacggccctctggcctccatgaaggatcaaagtctgggcaaagacaattctaagttgtaggtaaacatgcttttcatttccctccattccttacttttgtcataagcagtctggattttcaggggtaaaggctgatagggttgccagatacagtcattaaaaattgagaatgtgcagttaaattggaatatcagataaacaattttaaaaatatatgtaacacacatatgccaaaacactggttatctgaaattccaatttaactgggcgtcctgtattttatctgacaagctctaactacttctttaaaataatttgttaacttcctacaaaaaatctctaaatgggaggaaaaaaaaaatcccgtaagttgtctgggccaaaagcagaagtggctccatggcagtcagccttctccctaacttggcttaaaaagaaaaagccaaaaccagaagtcccaaaagcttgcgtttaaagcgggctgtgccgcagctttcccgcctgttttctgcggaatgtagcacggcagccaccccgcgtgggtggggctcgtatggttgtgtccttgctggttgggaaaggaggtgccggaaacttcaaaccacggccagggtacaacgtgtccgcttaggcggcgatatgcgccgccatcttctttgcgggcaaaggccgaaaaaagtttgggactccactcccccccgctgagccgatggagggcatcgcccgctgcctcagcactctggtgacgtggaatcggggtcccctctttcagggctgatttctggtagcacgctgacgcctgccaaggcagggaaaggggacgccgcctctgtcccggatgtaagatggcggcgcggggggcggcctggcggggcggtcacgtggtgaggagtagcgcgcgagcctccttaagtgatctctaaggttcgtccggacgcacaggagcagcggagcgcgagacgggtcttgtgtccgcacgcgtcgagtcgtcgcagtcgccacccgggccatcgccgggcccggtttcactgttaaggggttttcgtttgttccgttttcgcctcctgtagagctgaacgggaattccccgaagggtgctggggaacgggtggcctggggacttcccggctatgccttggctgctgtttggcggagccggcggcagcctctgcgggatgcccgccggcgattatcggcgccgagagcgggccggcggcgggttcgacagcgcggcgcgggtgggggcccgggtaccggactcggccgcagcccagcccccaccggggactcggagcagggaggggcgcgagcggcgcagctcgggacgtggcggcagctcctagcgggcgaagcgcgggagcgctgctcgctgcctctcgggggcagtccagaaccagttggtgtctgactgcgcttttgccgcccatttcctgctttcgagcggctgaggcgacgcgctcccctcgggcagtggagggagcggctctctccgcaggacaccgccgcttttctctcttcagagcggtggctgacgtacagaacgccggctgtatcacccgggcgccggcgccgcctctcatccccgtagctctcggggcgcgccgggagtagccgagccgctgggtgctgggcggggtctccgggcgcggcgcggggggaaggcaaaggaaaagaaggggcggcgggccgacgtcggcggcgaggaaggacggaggagcgccggagccgctttgctgccctccgcgtggtcccgtgcctccccgacaccatggccctggctgaggtagtagtttgtgctgttggtcgggttgtgacattgcccgctgtggagataactgcgcaagctactgccttgctagtgctggtgatgctcagcgccgcggaggacaatggctgggaatcccctttgttttccggggcgctgcctggggacagcccgcgaagcctcggcgcccggccggcgcggccaccacggaaaccgttagtttcacattttcctagaaggaattgaggggagtggggtggaccgcgatgcattttaaaggttgggaaagagctaagccattggattccttttcttgaaggaaggagtggaattgtgtaagataattgatacagataactttttcaccctaaaaaattctaacacttctttcagcagttaaatgccaaatttagtgtgtacctgttttacttcattctttagctgtaggttggagtggtgtgagcgatctgcagaactggcattagaggggcagaagaagtagacctgataattaaagtttatgccttaacattttagatctggtttctgatatgctctcttagtaaatctgagtgtgtctttaaaaacgtaaacccaaagcaatttaaagtttctctttaaactttgcaactcgcgaatgagaagattgaaattatttgtaggtaattgcactattccgattttttaatgtatgaggcaaacaaataaattctatgtacagtgtgctgtgaatggttttgttttttgttttttctttttagtttaaccttggggctcagattctgctggtgtggtgggttggttttttggtttttatggcctttgattctaatgttatgtggtacttacatctttgaggttttgtatgggagaagaggactaggaattgaaagtggtttctagatttgagtttaaaatctactaacactcattttgattcctgagtggccactactcctaataggaaaatacctttgcatagagaaaaaaggtagtttggataactaatgaaaatact

SEQ ID NO: 1728 - DNA, 3672 bp, Homo sapiens
gagatttttcaagagcttgggatgttcttcttgaccatatacagtcagcagcactcagcaaaaacaatgaagtatctctggctgctctgaaaagcttccaggaaattttacagattgtgtcccctgtcagagactcagataagcctgagacaccacctgtagttaatgtacctgtgcctgttcttatagggcccatatcaggcatgagcaggccatttgtaagaacagattccattggagaaaaactaggaagatatagtagctctgagccacccattgttactgatgagcttgaagatttgaatctatggtgggctgcgtggaatacctggtatagaattggatctgaaagtactaagcctcctattacttttgataaactaacttttattcctagccagccttttcttacagctttaattcagatatttccagctctctaccaacacataaaaactggtttcaatatggatgacttgcaaaagttgggagtcatattgcacagtgctatttcagtcccaataagttcagatgcatccccttttattcttccatcttataccgaagcagttttgacaagtttacaggaagctgtacttacagctttagatgttctccaaaaggccatttgtgtaggaccagaaaacatgcagataatgtatccagctatatttgaccagttgttggcatttgtagaattttcctgtaaacctccacagtatggacagctggaaacaaagcacattgcaaatgcaaaatataatcaggcggaatgggtagccttgaattatgtgccgtttgctgaaaggtctttagaagtagttgtggatttataccaaaaaacagcgtgtcacaaagcagtggtgaatgagaaagtgctccagaatattattaagactcttagggttcctctcagtttgaagtattcctgcccttctgaaagcacatggaaactagcagtatcctctctcctcagagttctttctattgggctacctgttgcccggcagcatgcttcttctggaaaatttgacagtatgtggccagaactagccaatacttttgaagattttctctttactaaaagcatacctccagataatctctctattcaagagtttcaaagaaatgaaaatattgatgtcgaggtagttcaacttatcagcaatgagatactaccttatgccaattttattcctaaggaatttgttggtcaaataatgacaatgcttaacaagggctcaatacattctcagtcatcttcatttacagaagcagagattgatattcgtttgagagaggaattttctaaaatgtgttttgaaacattactccagttttccttcagtaataaagtcacaacacctcaagaaggctacatctcacgaatggcactctcagtgcttttaaagaggtcccaagatgtactacatcgctatatagaggatgaaagattaagtggtaaatgccctcttccaaggcaacaagtaacagaaattatatttgttttaaaagcagtcagtactcttattgattcacttaagaaaactcagcctgagaatgttgatggaaatacctgggcacaagtaattgccttatacccaactttagtagaatgcatcacctgttcttcttcagaagtctgttctgcacttaaagaggcactagttccttttaaggatttcatgcagccaccagcatccagagttcaaaatggagaatcttgaccggctacaatatatttgaaagcaggaagatagtctaaaaaatgtttgctcctaattgagtcttctgtgagaaggacatttcttactgcaaataattcttggcagctgttgttggcctcctttaaattctacttacctgagttcagtaattcatattacaggcttgcacatcaacaaaggctcctgaatgaacagcagtgtaaggctttaataaattaaactgatgggagggataattaacactacagtatacatgctaccatatctccagttggtgatttaaagtgagcttatgtacagtttgtggtgtatgtgttaatgatgtactttttaaaaagaaagaagagatatttcaattcagtcagatttattagtctggtgtttttgcaccctttttcaagtacaaaatcgtactagaattttatgcaagatggtactgtaacattccatattatctataaccagcctttgttaacaaagggaactgatatacttgtgtgtataataaatggtacagttctgtataaaatagtgcatttatttaaattttaaaagtattgataatgttaaatgcttaaagctctatttattattaatacaaaattgtttgcttacatttttacttataatttgccttcatatgtggcggataagctcaccatatgatcatgcagttagcttcatgcttattttaaatgtattattagtgaccattaaacatctgaccagtaaggtcatgtgaacacagcagcaaatagtttatgatttgctgattttggagctttgaaatataggttcttaatacattgatacatattgtagcactatgacttcatcatacctcatttctttaaacagctctccaagctttcactgaagtctgtctgttttttatattggctgtctggattttaaagacttttcatattttatatttctactgattttgtttcccctaacaacatttgtcactgtctttgaattatgacccaggcaagatgatttcagattttctaaaatcttgcctgtgaggttttgttcatatcagtgcttcattttgtaatgtcttctcaagaaaaatacctatgttaactcacaagtataaaatatgtgtgtattataaaacaatgaaaagtgtatttttggagatagtcaagcatttagaagtgcagtgaacttgctgtcacggagtaaaatgctaattatgtttcactttcctagcctagtgaaaaagaaaagtgctcttgagtacaataccttaattatttcttaaaatactgactttgacctagctcactgtattttttatttaatggattatggattacagtatttttcttctgagttaaattttcataatttatgtgaagacacaaagatgtttaaaacaatgattattcataagaaatcatgatggtctcagtattattttagtgtattggaaggtctttgatcttaatagaatttataaatttcagcttctccagaataatcataaaactgcaaaaagatattataattgagtcatgattgagatacagttttgaggctattataattgtataattatttaatttgcattatctgtaaaatgtagtaaggtctttgaggggatattttttatttacatgaattactgaatttctattttattatttcacctaaaattaaggtaaaatatggcatttcataagttctgctttcagcattttccttaaagttgtaaaaaatcaagctatgtacttattttctatatttaggtgtgttaaattgaggattagaaaaatccacataatcactgataaagcattgaaacagaataacccaagggtagtgtaccgattcagtaacatgttaaaaatattgctatgcatttattcaaaggaaaatggtctgttcttgagaaataaaagatcagttgcaattaggataattaaatagttaa

SEQ ID NO: 1729 - protein, 503 aa, Homo sapiens
MSRPFVRTDSIGEKLGRYSSSEPPIVTDELEDLNLWWAAWNTWYRIGSESTKPPITFDKLTFIPSQPFLTALIQIFPALYQHIKTGFNMDDLQKLGVILHSAISVPISSDDFILPSYTEAVLTSLQEAVLTALDVLQKAICVGPENMQIMYPAIFDQLLAFVEFSCKPPQYGQLETKHIANAKYNQAEWVNYVPFAERSLEVVVDLYQKTACHKAVVNEKVLQNIIKTLRVPLSLKYSCPSESTWKLAVSSLLRVLSIGLPVARQHASSGKFDSMWPELANTFEDFLFTKSIPPDNLSIQEFQRNENIDVEVVQLISNEILPYANFIPKEFVGQIMTMLNKGSIHSQSSSFTEAEIDIRLREEFSKMCFETLLQFSFSNKVTTPQEGYISRMALSVLLKRSQDVLHRYIEDERLSGKCPLPRQQVTEIIFVLKAVSTLIDSLKKTQPENVDGNTWAQVIALYPTLVECITCSSSEVCSALKEALVPFKDFMQPPASRVQNGES

SEQ ID NO: 1730 - DNA, 10241 bp, Mus musculus
ctccctccagcctctttcatctgaaccgtggcgcgctcgtgcctctagttaatcagccttccaagccacaccaagagtcatttcccgggggtaggctctgctggagcctggaaactaggagctgcctgcagtcttggggtctcctctgcctgtgagctgctccttccagtccaagggttagggccagaaaggaggacaactttggagtcaaaagactgaccactgtggttagcacctgagagaaccttcagtttcttctcttgctacgccacccccttcgggtacaagtcccaaaatggtttgccagttttcgttcccgtaactggagcgtggggaagcccctcaacccttccagagagcccatcccgcctcaggacttgaaggcacacttcaccaggtgagtgcagttcgtgcagttcccggtggcaacgcctggagtccctcccccgccccccaccccgccccctccccgcctccggccgctgtggcgcagaccttgactcacgagctgcaagagtcgtaaagggtccccaagcctcagtgccgggtaagcaaggcagcgggtcgcagccccctcctgggcgggccttcgcgtcccgcccccggccaccactcgacaccctctgcctgacgtcaaggggttgggggcggagagcggcggtggcggcggctgcagcggagaaagaaccggcgcccggcgcggtggagcgccgaatccgagctcaggggcgccgagagccgtgctgagaccgaggggcggtggcacgggacagccttagcgtgctggcgggcgggcgcagtctggagcggcgcgggggcaggggaggacggtggccggagtcaaacgcgagggcagcgcccagggattggagctgcacgaaagaggtgagtgaggccggagcggtggggccccggggccgctgctttgtccccttgcttgggtaggggctagcgcgcgcgctagaggacagcgtctaggggtgcagggcggggcgacagcaaagacagctgtccgatccgggtccctcttgagtccgccgcgggctgcccagtggcgatcggcatcaaggcaagcagtgcctgcagctccactggccggagcagcgggagcctgggggtacggacagcgctaggggcagtgggggacccttgggctgtccagcgcgcggtccgaatctttgccaggctcgcgaactgctcgggttccccccacctcgacggaaagttaggggcgggcttggaccgtggccgatgttgtgggatcggatttccctagcgcggccccccgccctcccgttctgctccggaggcgggctggcactgagaaccagccccctagccaaagctccgccgcccggtccctctctggagcgccgcaatccacgaccgggtgtgcaagtgtggggtgcaaatcctggtcctgcacccctccatccccttggctgtccgtgtcccttgcttcgggaagagcttgggggttgggtcaccgctacgcctgcagattctcggagcgcaccaccgggttttgaccccagcctagggtaattggcagagaggaaactgagggtgtgtcaggggggactgctccggggaaggcagccccagccccccgcccttcccgcgcggaggttcttggccgacagggggcgtccgcaagcccggctttgccacgctcccagcgctgccgctttgtttgcattcaaatccccggagctgggggaggggagagtccacagtagggagaccgagaccgggtcttggctaggaacctttgttttggggtgcaatcctcagattctgcatctctgttcccagcccctagcgtctagattagtggagatccgttccgtttgcctactgcctagtgcatggtccccgaggtgcaatcccggagttaagaacgttcgtcagagccggggaggaggggacgcagcccttgacgatcatttgtgggcatcccctgttgtccaggagaaccccgcttcggcctccccaacccatttcacttccctccacgatcccgctctcgcggaggcgaggagattcccagacagaagcctggaactgactcgtggcccggtcgcctctctgcgggagggtcagtgtcttgtagaaggctgttggagaaacaggactggtcctggtcatttccacgcccatcccacccacttcctgcctccctcttgggcaacaaaggggcctcggaagctgggcccatttggttcccggccccactcctactccagccctgctgatgtggaaccgggtttgggctctgcccggctattgtctgcgctgggggaggggacgggctggggccgggaactctacacgctgcctgcttcaccaagtcccccactgaagctctttgcccaaccggctgcctgcggctgctgaataaggggtatatctccccgaattaggtcttggggctggcctgggtcccactggtagcaagccctgttttttatggttattgtaagaaactctgaaacctttaaggccagaaggagccaatgagggggagtccctcttttatttttttccacacaactccctgttgaagggagggagtagggatggcctggaggccacaggcggcttttgatgactgcccacgcctagtgcttgctgactaagttcctctccttgctcttctgggagacccccagggctcttgtgggcagaggccagttgcaggatcaggaggagatgtaaaggctctgggggaggtttgttccagtgtgcgtcctgtgttgcttgtctcttggtgcgggcccccttccggtctgtgatgctgaccagtttcttttccttcagcagggctgctggactgaagtttagaccctgggtgtctgccatggccccacactgggctgtctggctgctggcagcagggctgtggggcctgggcatcggggctgagatgtggtggaaccttgtgccccggaagacagtatcttctgggggtgagtgcctgaagcatgggaggcagggccagagggaggctgggatagactgctgggggaagggcgaggaggggagtgatgcttgcttgcaggaaggagctgctgctgaggaattacccccaagcatgcacctttacaccgatatgtgtggctgtggctttctaagaaacgcgagtggccccaggggcccagaactggtagtgctggtctagacctgggctttgcccccttctgacactgggataactttatgggatctcttaccagcgcacccccaccctcacccagacctggctggcctggtgtgcaagggaggtagtttctgaatcaacctccctgttcctcacttgaattgtctctcttgcttggaagcctagagagagaaacctgaaccccagggcaagtgtaaacctaaccctatctccagtctttctagctgtctgtccctagaagcccctttaattcaccctaatggtctcctctgctgctctaacactggagccttctgatggctctgggtggacacatataagctcgcgcttcgtgggggaggagacagagtgaaccagacagctctcctttgctttcgcgcacacctgtatggagaggtgatgtcaggtgtttgtatcatctctgtgctcctgggacatgggatgagctcacctcccacaggctacactcagctgctattaaagcccctcccatgtcgacccaactctcgttggtcactgcctcccgaccctgaagctggcttaagtagggatcctgtgaacaggtgtgcaggtatacggtcctctgacaggttacatgactgtatgtatgatcacgccctacgtgtgctggccggaagcacaacttcccaggcttcagcaccacctctgagtctcaggttccttttatctcccagtcctaacctcttcttccttctccacacgccactttgccagtcccctgcccatctgtgcgtgtgtctctgaaagcctggattggtgcctgctgggacttcttagacaaggaatgcttacaactattctgtgcctcctgatgcagtaaatccgccaccagggtctgcctagaccttgccatggtcagcaagtagcagagcaggaaatggcaaccgaggaagcggggctgggggtgggggggaagtgtccagttctgtgcctgaggtaccgctgaccctgagggagcgtcatcagtcagatggcttcctctggccggaagctttggctgaggtatccttccttccccgttaccagcccagattacctcctcccaggctgaggaagggccttggaagcctgggtaggatggagctgttgagccaaaggctattcagaaaaagtcctttatggcccatagaggtttggttgtcgtctgtgtgtgtgtagtggtagcttttgtggagaatcgtgatgacgaggcccaggggagccttggacaaaggaagattgatggattcctggaaccccagggaggatgtcctctgcccctactcatccccaccttgttctaatatctgtttctgcagagctggtcacagtagtgaggcggttctcccagacaggcatccaggacttcctgacactgaccctgacagaacattctggccttttatatgtgggggcccgagaggcgctgtttgccttcagtgtagaggctctggagctgcaaggagcggtgagaggtggggcagtgggaggcactcagaggggagagggaaaggactcagggtgtagcctgtgcaggctgtccctcagcccagctctcttggggtgtcaagattagcaattgctttctgctcctggtttctgctagttggggtggtttggggcttctgtcagaatggggaccaggcgtcatcaatggtgtagcttaaggggtgtttgcagcacacttagcgcagacctgtgacattgctgatgtgtctgtccaatcctcagatctcttgggaggctccagctgagaagaaaattgaatgtacccagaaagggaagagcaaccaggtgggtgcttagagagcttcccctgccagcctccttctttaatctgcaccctggtgatctcctatctctgactctcagttctcactaacctgtatacctttctctccaaagaccgaatgcttcaacttcatccgcttccttcagccatacaattcctcccatctgtatgtctgcggcacctatgccttccagcccaagtgcacctacatcgtgagtggttccccctctctttgggtgtgccccttacccacctgttcctaacctatgacctccttccttgacctctcggggccatgatattttcagactgtatagagccccatagtaacacccatcttcgatgtcttcctgcccctagaacatgctcacgttcaccttggaccgtgcagaatttgaggatgggaagggtaaatgcccatatgacccagctaagggtcacaccggactccttgtgggtgagtggctgctgccagcacagaggggagaatctgggcctctgtcagtcacgctctgagtacttgtcttcagagcagtctctactttagttccctggcctctctgaccgctgttgtctcccgcagacggtgagctgtactcagccacactcaataacttcctgggcacagagccggttatccttcgatacatggggacccaccactccatcaagacagagtacctggctttttggctgaatggtgagtcatgggatgggactggggaagcccagagtggaagggccttccagggccctgggactcttgtcactggcccttttttcttcgtcccagaaccccactttgtaggctctgcctttgtccctgagagtgtgggaagcttcacgggagacgatgacaagatctacttcttcttcagtgagcgggcagtggagtatgactgctattccgagcaggtggtggctcgtgtggcgagagtctgtaaggtaccaagttccgcagtggtgggcagcgggagccctgaaggcctggcaggggctgaccagccttgtctccttgccatctgccagggtgacatggggggagcacggacgctgcagaagaaatggacgacgttcctgaaggctcggttggtgtgctcagcccctgactggaaggtctacttcaaccagctgaaggcggtgcacaccctgcggggcgcctcttggcacaacaccaccttcttcggggtttttcaagcgcgatggtaagcggctatggggtagctgggggtagggaggagcaggtggtcaggtagggatagtgtgtgggtgtgagggcccccgcacaggcgtctggaggaagtccagcgggtcagtgcctggcagccaagatgactttgcgcctgctctttctaaagctgggtgggggaaggtgagcagaaagctgcctggggtgacacctcagggctacctcatggtcgtgactgctccatactaagctttgcccttcctactttttcctctgttccctggtatggtgggagcaagtaggcacccaacctgacttccaaggtccttctttaacaggggcgatatggacctgtctgcagtttgtgagtaccagttggaacagatccagcaagtgtttgagggtccctacaaggagtacagtgagcaagcccagaagtgggcccgctatactgacccggtacccagccctcggcctggttcggtgagttttcggcttggggatgtattcccaacatcggctccaggacccacttattcgccagctgactgacagccgccctccccacgcccctccccgacacagtgtatcaacaactggcaccgagacaatggctacaccagttccctggaactgccggacaacaccctcaacttcatcaagaagcaccccctgatggaggaccaggtgaagcctcggttgggccgccccctacttgtgaagaagaacactaacttcacacacgtggtggccgacagggtcccagggcttgatggtgccacctatacagtgttgttcattggtacaggtaggcgcttcaggtgtgcccaaggctgggaacctggggaggccccatagcctgattcctcatttgcatattcccatcacctctccaggagatggctggctgctgaaggctgtgagcctggggccctggatccacatggtggaggaactgcaggtgtttgaccaggagccagtggaaagtctggtgctgtctcagagcaaggtagtaagactgggccacacgcacctccctctctgttctctgctccattgtctatctggcgcccaggctctatgccatccatagttgggctcatgtagctctcgagttcccagaagtaagagatctaaggtggccagaacctgtcctctgaaggttctcttatagagccagtccctgtggggcccccattcccagaatccagccttggcaaactccttccaagtggggctgcagctctatctgcagtctcttctcggtcaagatgttttggtacccaagcaacagagacatccgatttctttgagtccctagtgggtgtctgagccaggccctcagtctccgggctcatttaagtgttcacgttttttcttttctttctttctttctttttttaacacctttatgcaaaactcatattcgcatcaccctctggattctgatttgcttgccctttaccagctactatgactcaaagttgctccctacaacgctgaataatgagatggcagcaagggaattgtggggctgagcaagcatgcagattggcagtcaccattcaaacagaggaaccccaccttccataggcactgctgtcactgtgctggctccgggggccgggggaaactgagtttcctggcccgagtgtgagcaagtgagcgtacgcctcagcctcacgggtctgccgtccgtccctgtctaagaaggtcatgtctgtaaagtgattaggattttgatggcttgtcgtaagccctcatcaaaattgttcctctggcctggatttttcttccgctgcctttttcttccttgggggacctagtatgtttatgctctctgaacaaatctcagccatcaccccgaggcgtggtgtggcttaccctgtgctttgttttactgtagaaggtgctctttgctggctcccgctctcagctggttcagctgtctctggccgactgcacaaagtaccgtttctgtgtagactgtgtcctggccagggacccttactgtgcctggaatgtcaacaccagccgctgtgtggccaccaccagtggtcgctcggggtgagtcagtcgtctctgagtgccagggccaggagggggaggctaaggtgattggagttggatctctgatgccacttctcttccctaccaggtcctttctggtccaacatgtggcgaacttggacacttcaaagatgtgtaaccagtatggcattaaaaaaggtgagctgttttccttttgttccctcattttgaggatgggcccctggatcacagccagagttagtttatcacctctcactgtgggacctggggttcctgcattaacactgggttctctctcatttctgcctctgcagtcagatctattcccaagaacatcaccgttgtgtcaggcacagacctggtcctaccctgccacctctcgtccaatttggcccatgcccactggaccttcggaagccaggacctgcctgcagaacaacctggctcctttctttatgacacgggactccaggcgctggtggtgatggccgcacagtcccgtcactctggaccctatcgttgctattcagaggagcaggggacaagactggctgcagaaagctaccttgttgctgtcgtggccggctcgtcggtgacactggaggcacgggctcccttggaaaacctggggctcgtgtggctcgctgtggtggccctgggggctgtgtgcctggtgctgctgctgctggtcctatcgctccgccggcgacttcgagaagagctagaaaagggtgccaaggcatctgagaggacactggtgtaccccttggaactgcccaaggagcctgccagtccccccttccgtcctggccccgaaactgatgagaaactttgggatcctgtcgggtactactattcggatggctctctcaagattgtgcctggtcacgcccggtgccagcctgggggtgggcccccttccccacctcctggcatacctggccagcctctgccttctccaactcggctccacctaggaggtggtcggaactcaaatgccaatggttatgtgcgtttacagttgggcggagaggaccgaggaggatctgggcacccactgcctgagctcgcggatgaattacgacggaaactacaacagcgccagccgctgcctgactccaacccagaggagtcttcagtatgaggggacccccccacctcattggcggggggggtctcatgggaggtgcactcttaacttttgcacaggcaccagctacctcagggacatggcaggggcacttgctctgcctgggacagacactgcccagcatttgcccggccgtgaggacctgctcagcatgggcactgccacttggtgtggctcaccaggacttcagcctcacaggagacacaccctcctctgtgaatttgagacatgtgggaccccagcagccaaaactttgcaaggaagaggtttcaagatgtgggcgtgtttgtgcatatatgtgttggtatgcatgtggaagaatgtgtgtgtgtgtgtgtgtgtgttgtaactttcctgtctctatcacgtcttcccttggcctggggtcctcctggttgagtctttggagctatgaaggggaagggggtcatagcactttgcttctcctacccccagctgtcccaagctttggggcagtgatgtacatacggggaagggaaggacagggtgttgtaccccttttgggggagtgcgggactcgggggtgggcctagccctgctcctagggctgtgaatgttttcagggcgggggttgggggtggagatggaacctcctgcttcagggggaggggtgggcagggcctcccacttgccctccgggttcggtggtattttatatttgcgctcttctgacagggctgggaagggttgttgggggagggaagggaggaggtgggcatgctatggatactggcctatcctctccctgctctgggaaaagggctaacagtgtaacttattgtgtccccacatatttatttgttgtaaatatttgagtatttttatattgacaaataaaatggagaaaatgaaattt

SEQ ID NO: 1731 - DNA, 4228 bp, Mus musculus
ctccctccagcctctttcatctgaaccgtggcgcgctcgtgcctctagttaatcagccttccaagccacaccaagagtcatttcccgggggtaggctctgctggagcctggaaactaggagctgcctgcagtcttggggtctcctctgcctgtgagctgctccttccagtccaagggttagggccagaaaggaggacaactttggagtcaaaagactgaccactgtggttagcacctgagagaaccttcagtttcttctcttgctacgccacccccttcgggtacaagtcccaaaatggtttgccagttttcgttcccgtaactggagcgtggggaagcccctcaacccttccagagagcccatcccgcctcaggacttgaaggcacacttcaccaggtgagtgcagttcgtgcagttcccggtggcaacgcctggagtccctcccccgccccccaccccgccccctccccgcctccggccgctgtggcgcagaccttgactcacgagctgcaagagtcgtaaagggtccccaagcctcagtgccgggtaagcaaggggttgggggcggagagcggcggtggcggcggctgcagcggagaaagaaccggcgcccggcgcggtggagcgccgaatccgagctcaggggcgccgagagccgtgctgagaccgaggggcggtggcacgggacagccttagcgtgctggcgggcgggcgcagtctggagcggcgcgggggcaggggaggacggtggccggagtcaaacgcgagggcagcgcccagggattggagctgcacgaaagagggctgctggactgaagtttagaccctgggtgtctgccatggccccacactgggctgtctggctgctggcagcagggctgtggggcctgggcatcggggctgagatgtggtggaaccttgtgccccggaagacagtatcttctggggagctggtcacagtagtgaggcggttctcccagacaggcatccaggacttcctgacactgaccctgacagaacattctggccttttatatgtgggggcccgagaggcgctgtttgccttcagtgtagaggctctggagctgcaaggagcgatctcttgggaggctccagctgagaagaaaattgaatgtacccagaaagggaagagcaaccagaccgaatgcttcaacttcatccgcttccttcagccatacaattcctcccatctgtatgtctgcggcacctatgccttccagcccaagtgcacctacatcaacatgctcacgttcaccttggaccgtgcagaatttgaggatgggaagggtaaatgcccatatgacccagctaagggtcacaccggactccttgtggacggtgagctgtactcagccacactcaataacttcctgggcacagagccggttatccttcgatacatggggacccaccactccatcaagacagagtacctggctttttggctgaatgaaccccactttgtaggctctgcctttgtccctgagagtgtgggaagcttcacgggagacgatgacaagatctacttcttcttcagtgagcgggcagtggagtatgactgctattccgagcaggtggtggctcgtgtggcgagagtctgtaagggtgacatggggggagcacggacgctgcagaagaaatggacgacgttcctgaaggctcggttggtgtgctcagcccctgactggaaggtctacttcaaccagctgaaggcggtgcacaccctgcggggcgcctcttggcacaacaccaccttcttcggggtttttcaagcgcgatggggcgatatggacctgtctgcagtttgtgagtaccagttggaacagatccagcaagtgtttgagggtccctacaaggagtacagtgagcaagcccagaagtgggcccgctatactgacccggtacccagccctcggcctggttcgtgtatcaacaactggcaccgagacaatggctacaccagttccctggaactgccggacaacaccctcaacttcatcaagaagcaccccctgatggaggaccaggtgaagcctcggttgggccgccccctacttgtgaagaagaacactaacttcacacacgtggtggccgacagggtcccagggcttgatggtgccacctatacagtgttgttcattggtacaggagatggctggctgctgaaggctgtgagcctggggccctggatccacatggtggaggaactgcaggtgtttgaccaggagccagtggaaagtctggtgctgtctcagagcaagaaggtgctctttgctggctcccgctctcagctggttcagctgtctctggccgactgcacaaagtaccgtttctgtgtagactgtgtcctggccagggacccttactgtgcctggaatgtcaacaccagccgctgtgtggccaccaccagtggtcgctcggggtcctttctggtccaacatgtggcgaacttggacacttcaaagatgtgtaaccagtatggcattaaaaaagtcagatctattcccaagaacatcaccgttgtgtcaggcacagacctggtcctaccctgccacctctcgtccaatttggcccatgcccactggaccttcggaagccaggacctgcctgcagaacaacctggctcctttctttatgacacgggactccaggcgctggtggtgatggccgcacagtcccgtcactctggaccctatcgttgctattcagaggagcaggggacaagactggctgcagaaagctaccttgttgctgtcgtggccggctcgtcggtgacactggaggcacgggctcccttggaaaacctggggctcgtgtggctcgctgtggtggccctgggggctgtgtgcctggtgctgctgctgctggtcctatcgctccgccggcgacttcgagaagagctagaaaagggtgccaaggcatctgagaggacactggtgtaccccttggaactgcccaaggagcctgccagtccccccttccgtcctggccccgaaactgatgagaaactttgggatcctgtcgggtactactattcggatggctctctcaagattgtgcctggtcacgcccggtgccagcctgggggtgggcccccttccccacctcctggcatacctggccagcctctgccttctccaactcggctccacctaggaggtggtcggaactcaaatgccaatggttatgtgcgtttacagttgggcggagaggaccgaggaggatctgggcacccactgcctgagctcgcggatgaattacgacggaaactacaacagcgccagccgctgcctgactccaacccagaggagtcttcagtatgaggggacccccccacctcattggcggggggggtctcatgggaggtgcactcttaacttttgcacaggcaccagctacctcagggacatggcaggggcacttgctctgcctgggacagacactgcccagcatttgcccggccgtgaggacctgctcagcatgggcactgccacttggtgtggctcaccaggacttcagcctcacaggagacacaccctcctctgtgaatttgagacatgtgggaccccagcagccaaaactttgcaaggaagaggtttcaagatgtgggcgtgtttgtgcatatatgtgttggtatgcatgtggaagaatgtgtgtgtgtgtgtgtgtgtgttgtaactttcctgtctctatcacgtcttcccttggcctggggtcctcctggttgagtctttggagctatgaaggggaagggggtcatagcactttgcttctcctacccccagctgtcccaagctttggggcagtgatgtacatacggggaagggaaggacagggtgttgtaccccttttgggggagtgcgggactcgggggtgggcctagccctgctcctagggctgtgaatgttttcagggcgggggttgggggtggagatggaacctcctgcttcagggggaggggtgggcagggcctcccacttgccctccgggttcggtggtattttatatttgcgctcttctgacagggctgggaagggttgttgggggagggaagggaggaggtgggcatgctatggatactggcctatcctctccctgctctgggaaaagggctaacagtgtaacttattgtgtccccacatatttatttgttgtaaatatttgagtatttttatattgacaaataaaatggagaaaatgaaattt

SEQ ID NO: 1732 - protein, 820 aa, Mus musculus
MAPHWAVWLLAAGLWGLGIGAEMWWNLVPRKTVSSGELVTVVRRFSQTGIQDFLTLTLTEHSGLLYVGAREALFAFSVEALELQGAISWEAPAEKKIECTQKGKSNQTECFNFIRFLQPYNSSHLYVCGTYAFQPKCTYINMLTFTLDRAEFEDGKGKCPYDPAKGHTGLLVDGEKATLNNFLGTEPVILRYMGTHHSIKTEYLAFWLNEPHFVGSAFVPESVGSFTGDDDKIYFFFSAVEYDCEQVVARVARVCKGDMGGARTLQKKWTTFLKARLVCSAPDWKVYFNQLKAVHTLRGASWHNTTFFGVFQARWGDMDLSAVCEYQLEQIQQVFEGPYKEYSEQAQKWARYTDPVPSPRPGSCINNWHRDNGYTSSLELPDNTLNFIKKHPLMEDQVKPRLGRPLLVKKNTNFTHVVADRVPGLDGATYTVLFIGTGDGWLLKAVSLGPWIHMVEELQVFDQEPVESLVLSQSKKVLFAGSRSQLVQLSLADCTKYRFCVDCVLARDPYCAWNVNTSRCVATTSGRSGSFLVQHVANLDTSKMCNQYGIKKVRSIPKNITVVSGTDLVLPCHLSSNLAHAHWTFGSQDLPAEQPGSFLYDTGLQALVVMAAQSRHSGPYRCEEQGTRLAAESYLVAVVAGSSVTLEARAPLENLGLVWLAVVGAVCLVLLLLVLSLRRRLREELEKGAKASTLVYPLELPKEPDPFRPGPETDEKLWDPVGYYYSDGSLKIVPGHARCQPGGGPPSPPPGIPGQPLPSPTRLHLGGGRNSNANGYVRLQLGGEDRGGSGHPLPELADELRRKLQQRQPLPDSNPEESSV

SEQ ID NO: 1733 - DNA, 10385 bp, Homo sapiens
  misc_feature (1)...(10385): n = A,T,C or G
gctggagaaagagccggcgcccgccgtggtggcgcggggagcccgagcctaggggcgcggagccgggcggggacggaggggcggtggcagagaggccgcggagggctggcgggcgagcgcgggcaggcggcgacgcgggggcaggggtggacggcggtcagagccgaacgcgagggcggcgcccggggactggagctgcgcgcaataggtgagcgaggccgggnnnnnnnnnnnnnnnnnnnnnnnnnnnnnnnnnnnnnnnnnnnnnnnnnnnnnnnnnnnnnnnnnnnnnnnnnccgctttgtccctttgcttgggcaggggctgccggacgcgggagggacaggggctggggcgcggggagccgcggcggcggagacggctgtacgcggggatccttcctgcgacccccgcggctgcttcgcagggtctcgggagtggggcgcacagcacctgcagccccgcagccccggggccggaggggcgcgccagcgagggttcctcgcgcggtccggtccgcggccgggatcctcgccaggctcctggactgccctcggcgctcccacccccgatggaaagtttggggcgggcttggagggaggccgatgttgtgggatcggatttccctgccgcggccccccgcccgcccgcccattccgctggggaggcgggttgtcccggaaagccaggcccccgggccgagccgggccgcgccgtccccggctggagcgctcgccctgcagggagggccgcggtccacggctggccgctcggggtgggcgagggtgtggggtgccccgcctggatcccgcacccctccccccaacccctcctcccggctgcccgtttcctcgccctggggggagctgcgggtgggagcaccgctgccgggcggatcctcggagcacgccacggggtgcggcccgatcctcgggtaaggagccgagatgaggccgcgggcgttttggggggctggtctggggcgcagcccccgctctcccgcgccggggctctgggccgacagggggcgtccgcaggccgggctcgccacgctccccgcgccgccgctttgtttgcgttcaaatccctggagctgggggaggggagaacccggggggacccgggacggggtcttggcggggaccctttgtttgggggtgagcaggtccccagcttctgcgtctccgcccctggcacgggaaggctggagcaggggaagccaatcccgctggcccgcccaggccagggtccctggggcgcagtccccgagttgggaaggttcgtcagagtcgcgggagcgcagcgggtgccggccgtgcgcggcgcgttgccagcggcccgggaggaaccccctcgcgtccccgcccctacctccccccgtcgcctgcgcgcgccgccggagtccccgactcgacccgagctcggtccccccaccgcccctccgccagagggctggtgtttcggaggaggcagtgcgaggaacaggatgaggccctggtcatttccacgcccatcccacccacttcctgcctccctcttgggcaacaaaggggcctcgggaagctgggccccttcgctcccggcccttctcacactcctgccctgctgatgtggaacggggtttggggttctgcagggctattgtctgcgctggggaaggggacaggccgggaccgggacctccgctcgcagccggccgcaccaggtttcccctttggggctttcccgaccgcctaccccaccgcatgccctcgtcgccctaaggagtcttcctcccagaattaggtgttggcagggtccggagccccagtggctgcaaggcctgctgcctgaggttctttcaagaaactcaaacctcttaggcctgagtgtgtatgttgggcgggggtcccctttttatttctcaaatgatttcctgttgcgcagaggtagtggtgggtctggaggccagggagggcttcccggagcctgtttagccttcagccaactcaactcctccccgcttcccagggagacctgtggtcttttaggcagaggccaagtgtggggacttaggtccacctccaaagagaaggggaaggagggcaccggggctcctggaaggcctgatgaggagtcctgtggcctctcctgctgcgggcccctctggtttgctttctctggctgtgatttctgaccatgtcttttccctcagcaggacagctggcctgaagctcagagccggggcgtgcgccatggccccacactgggctgtctggctgctggcagcaaggctgtggggcctgggcattggggctgaggtgtggtggaaccttgtgccgcgtaagacagtgtcttctgggggtgagtgcctggaggggtgaggaggaagtcagggacaggctgctgaggagttgcccccatagtgtgctggctttattctcacgtgtgtggcacagctttctaagaaactcgagttggaagaacgggcagtgtgggttgggacctgggattagcctcctctgggggagctctgtccaactccccaccccagactgcctgcccaggtgtgggagggggagagccttctgcctcgccctctccacgcctcgcttcttgaattgtcactggcgctgggagcctaaagagaaactggaaccgggataaatataaactggaggctctctcccctggctccccaggcccccctaagacctcctactgccctgtacacatcatacactctggtggccctggaagtgtgtgtgtatgtgcacatgctcgcatggttgccggggcacagcggggacccagcagtgctccctgtgcacacacccgtgtgaaaggtgatgtcaggtgtttgtatcagccgtgcgctctggggacctgggatgagctcacctcccacaggctccactcgggtgccagtgaagccctgccatgccggtctgtgtctggatccattgttgcctgcaaagactaaggctggtttggggggaccctgaggacaggtcggcagccatatttggcagctgatgtaggaatcacgtgactgtataaatgtcgtagtgccctgcatgccgggtggcagcaagacttcccaggccccagccccatctccgctctctgagcctctggtttctccggacctccctggcctggctcacagcccagctcccctcctgccatccccacctgtcctagtggcctgctgtgctcgcatctctggcagcctggattggggtcctgctggagtgaagggtttcctgaggcagggagtactcatagccgtctgtgcctcctgctctgctggactctgatagaggcagtgggcagcagggcaaagaaggaagcagccgccgaggaagcgaaggtggggtgggggtgcccagccctgcggccggaggtgccattgaccctgagagcaagagccatcagtctgatggcttcctctggccggaagctgtggctgagatatccttccttcctcccagcagcctggatttgcctcctcccaggctgggaaaggctagggaggcccaggtggggctgtcagggccaaaggctgtttcaaaagtgtcctttattgccaatcagggggtttggctggcatctgcttgtggcatggggtgctggctctcgtggagcaagactgagggctgtcgagccccaggggtcctgcccatcagcagccatgcttacccctgcagagctggccacggtagtacggcggttctcccagaccggcatccaggacttcctgacactgacgctgacggagcccactgggcttctgtacgtgggcgcccgagaggccctgtttgccttcagcatggaggccctggagctgcaaggagcggtgagaggtggggcagtgggaggcagtcgggcctgccagagggcaaggcccagaggggctgtgcttggctaggtggtccctcagcctggctgcccccacagaagtgctgctgggcatccggggcctgccctctggttggggtcagcatgcggcattcctctcctctctggcacttactgaattctgtgtagtggggtggtttggggcttccattctgtactaaaggaagtccccagagaatagggaccatgcctctgcactgggcgtccctgtgttgctgctgcaggctgtgcttgtgacacgtgctcagtccgtacctgtaacgtggctgacatccccttccctttccccagatctcctgggaggcccccgtggagaagaagactgagtgtatccagaaagggaagaacaaccaggtgggtgcttggacgctgctcctggtgctgccttcaccccaggacgtctcctcccattctggccctcgcgctctcactaaccggacacctttctgcccccagaccgagtgcttcaacttcatccgcttcctgcagccctacaatgcctcccacctgtacgtctgtggcacctacgccttccagcccaagtgcacctacgtcgtgagtgctgccctcctacctcggtgtccccagccccccgccctcctcacccttctctggactcgtggatgtggcccacagagccctgcccttaagcatctcctcatcacctctctctctgtccttagaacatgctcaccttcactttggagcatggagagtttgaagatgggaagggcaagtgtccctatgacccagctaagggccatgctggccttcttgtgggtgagtggctgccccccatgcaggctgggtgagtccttggggcttggttccacttgggtctgtgttggccggatgtgtccatacctcatgtgtggcctagctgacctctgtctcccatagatggtgagctgtactcggccacactcaacaacttcctgggcacggaacccattatcctgcgtaacatggggccccaccactccatgaagacagagtacctggccttttggctcaacggtgagccaccggggggcctgtgggagccatgggtgggaggtcccccggggcccagcccctccctgctgacctcctccccttcccacagaacctcactttgtaggctctgcctatgtacctgagagtgtgggcagcttcacgggggacgacgacaaggtctacttcttcttcagggagcgggcagtggagtccgactgctatgccgagcaggtggtggctcgtgtggcccgtgtctgcaaggtaccgagtctcacagcggtgggccctgggagccctgctggcccagcggggctgaccggcagtgtccccttgccgtctgccagggcgatatggggggcgcacggaccctgcagaggaagtggaccacgttcctgaaggcgcggctggcatgctctgccccgaactggcagctctacttcaaccagctgcaggcgatgcacaccctgcaggacacctcctggcacaacaccaccttctttggggtttttcaagcacagtggtgagttggccagggctcccacagagtggggaggagctggggttcaggtcagggacggtgcatgggtgggagcctggaccaggcctcagaggcagtcccggaagccaggtgtccagaagccaaggagaatgctggcacctgcccctttcagagctgcctgtgaaggggcagggccccatgccaggtggcacttgagctgccagggcattctggtacccatggccagtttgtgccaggccctgccttcctgctgcttgcccttagctggggtgggaagagataaggtgggtacctgaccctgggctccctctcgctgtgacaggggtgacatgtacctgtcggccatctgtgagtaccagttggaagagatccagcgggtgtttgagggcccctataaggagtaccatgaggaagcccagaagtgggaccgctacactgaccctgtacccagccctcggcctggctcggtgagtgctagggcagggatgcatctccccacccagctgcggtgccatcccaccctgctgatggcctgccccccacaccctgcccccagtgcattaacaactggcatcggcgccacggctacaccagctccctggagctacccgacaacatcctcaacttcgtcaagaagcacccgctgatggaggagcaggtggggcctcggtggagccgccccctgctcgtgaagaagggcaccaacttcacccacctggtggccgaccgggttacaggacttgatggagccacctatacagtgctgttcattggcacaggtgggtgcatgggtatgcaggcatggctgctcaaggctgggcagaagcccgtgtgcccagggcagggagatttggagctgccccacggccttgtgccctctcatttacaccttctcctctgcaccccccaggagacggctggctgctcaaggctgtgagcctggggccctgggttcacctgattgaggagctgcagctgtttgaccaggagcccatgagaagcctggtgctatctcagagcaaggtagtaagttgggccctatctgccactgtccccagcactatcccatctcactctctccatctggctgcttctcccagttgggcctatgtgcttggccagtgcagagttaggaacacacacacatgtggatgcacaccttgcctaacttggggtgggttcctggaaacgagaatgaaaacagaatggaatctgcactgcacagggccattatatatagccaggtcacggggctgcgctcccagcatcaagccttggcaactgctcccatgtttctttcagaccctccaagctgtgctgtggttctggctctggcctcttccctgaccatgcccctgtgaccagacctcccaggctgtgagatgtttatgatgccctcaccatggtggttttccttccagcccccatttccgtgactgtttccctgaagtgcttgcattatacccttgtgcaatactctttttggtttttttttgagatggagtctcactctgtcacccaggctagagtgcagtgacgcgatctcagctcactgcaacctccacctcccaggttgaagctattcttatgcctcagcctcctgagtagctgggattacaggtgcctgccactatgcccagctaaaggttttttgtttttgtttttgttttctttgagatggagtctcactctgtcgcccaggctggagtgcggtggcatgatctctgctcactgcaacctccacctcccgggttcaagcaattctgcctcggcctcccaagtaactgggactacaggcacgtgccaccatgcccagctaatttttttttttttttttttttttgagatggagtctcgctctgtcacccaggctggagtgcagtggcgcaatctcggctcactgcaagctctgcctcccaggttcacaccattctcctgcctcagccttccatgtagctgggactacaggctcccatcaccacgcctggctaattttttgtatttttagtagagacggggtttcaccgtgttagccaggatggtctcgatctcctgaccttgcgatccgcccgactcagcctcccaaagtgctgggattacaggcgtgagccactgcgcctggccagccggctaatttttgtatttttagtagagacaaggttttaccatgttggccaggctggtcttgaactcctaacctcaagtgatttgcccacctcagcctcccaaagtgctgggattccaggcatgacctgctgttcctagttgccttgtgcaatactcttgtggcatgtttgctacacctcctgaactttgatttgtttgccttttaccagctattatgactcaaaattgtcccctagaacatggaataatggcagaaagaaagtgtgtggttgaataaacacacagattggcatccaccgttgaaacaggaaaacatcttatgttatgctgctgctgttgtgagggctgatgggccttgaaatgtatttcctgcactatgtgtgtgtgagtgtgtgtgattatactttttggcctcacagccccatcatccctttctaataacgtcacgtcgataaggggcttaggattgcatctggcctgtgtaagccctctgagttctgcggttcttagagttcccttttcagcactatagctctgccttgttcccttgttcctccttctggcgccccgtgctgtgccccctgcaggagtccaagctgtccccatgctgcgttctggtccggccgcccctcccgtggtgtggccctggccgacccccctcctgcgccccgcttttctcgcagaagctgctctttgccggctcccgctctcagctggtgcagctgcccgtggccgactgcatgaagtatcgctcctgtgcagactgtgtcctcgcccgggacccctattgcgcctggagcgtcaacaccagccgctgtgtggccgtgggtggccactctgggtgagttgggctctacataggccaggacctccagggactcagggtggttggagccaggctgctgatgtaccctacatcccctaccagatctctactgatccagcatgtgatgacctcggacacttcaggcatctgcaacctccgtggcagtaagaaaggtgagctttttcattcccgtcgcatcgggctgagccctggaccagagctggagtttctgttctcctcttccccagccctgctttcctgcactaacatgcactctgttttctctgccactacagtcaggcccactcccaaaaacatcacggtggtggcgggcacagacctggtgctgccctgccacctctcctccaacttggcccatgcccgctggacctttgggggccgggacctgcctgcggaacagcccgggtccttcctctacgatgcccggctccaggccctggttgtgatggctgcccagccccgccatgccggggcctaccactgcttttcagaggagcagggggcgcggctggctgctgaaggctaccttgtggctgtcgtggcaggcccgtcggtgaccttggaggcccgggcccccctggaaaacctggggctggtgtggctggcggtggtggccctgggggctgtgtgcctggtgctgctgctgctggtgctgtcattgcgccggcggctgcgggaagagctggagaaaggggccaaggctactgagaggaccttggtgtaccccctggagctgcccaaggagcccaccagtccccccttccggccctgtcctgaaccagatgagaaactttgggatcctgtcggttactactattcagatggctcccttaagatagtacctgggcatgcccggtgccagcccggtggggggcccccttcgccacctccaggcatcccaggccagcctctgccttctccaactcggcttcacctggggggtgggcggaactcaaatgccaatggttacgtgcgcttacaactaggaggggaggaccggggagggctcgggcaccccctgcctgagctcgcggatgaactgagacgcaaactgcagcaacgccagccactgcccgactccaaccccgaggagtcatcagtatgaggggaacccccaccgcgtcggcgggaagcgtgggaggtgtagctcctacttttgcacaggcaccagctacctcagggacatggcacgggcacctgctctgtctgggacagatactgcccagcacccacccggccatgaggacctgctctgctcagcacgggcactgccacttggtgtggctcaccagggcaccagcctcgcagaaggcatcttcctcctctctgtgaatcacagacacgcgggaccccagccgccaaaacttttcaaggcagaagtttcaagatgtgtgtttgtctgtatttgcacatgtgtttgtgtgtgtgtgtatgtgtgtgtgcacgcgcgtgcgcgcttgtggcatagccttcctgtttctgtcaagtcttcccttggcctgggtcctcctggtgagtcattggagctatgaaggggaaggggtcgtatcactttgtctctcctacccccactgccccgagtgtcgggcagcgatgtacatatggaggtggggtggacagggtgctgtgccccttcagagggagtgcagggcttggggtgggcctagtcctgctcctagggctgtgaatgttttcagggtggggggagggagatggagcctcctgtgtgtttggggggaagggtgggtggggcctcccacttggccccggggttcagtggtattttatacttgccttcttcctgtacagggctgggaaaggctgtgtgaggggagagaagggagagggtgggcctgctgtggacaatggcatactctcttccagccctaggaggagggctcctaacagtgtaacttattgtgtccccgcgtatttatttgttgtaaatatttgagtatttttatattgacaaataaaatggagaaaatgaaacga

SEQ ID NO: 1734 - DNA, 3782 bp, Homo sapiens
ctgtgctcgcatctctggcagcctggattggggtcctgctggagtgaagggtttcctgaggcagggagtactcatagccgtctgtgcctcctgctctgctggactctgatagaggcagtgggcagcagggcaaagaaggaagcagccgccgaggaagcgaaggtggggtgggggtgcccagccctgcggccggaggtgccattgaccctgagagcaagagccatcagtctgatggcttcctctggccggaagctgtggctgagatatccttccttcctcccagcagcctggatttgcctcctcccaggctgggaaaggctagggaggcccaggtggggctgtcagggccaaaggctgtttcaaaagtgtcctttattgccaatcagggggtttggctggcatctgcttgtggcatggggtgctggctctcgtggagcaagactgagggctgtcgagccccaggggtcctgcccatcagcagccatgcttacccctgcagagctggccacggtagtacggcggttctcccagaccggcatccaggacttcctgacactgacgctgacggagcccactgggcttctgtacgtgggcgcccgagaggccctgtttgccttcagcatggaggccctggagctgcaaggagcgatctcctgggaggcccccgtggagaagaagactgagtgtatccagaaagggaagaacaaccagaccgagtgcttcaacttcatccgcttcctgcagccctacaatgcctcccacctgtacgtctgtggcacctacgccttccagcccaagtgcacctacgtcaacatgctcaccttcactttggagcatggagagtttgaagatgggaagggcaagtgtccctatgacccagctaagggccatgctggccttcttgtggatggtgagctgtactcggccacactcaacaacttcctgggcacggaacccattatcctgcgtaacatggggccccaccactccatgaagacagagtacctggccttttggctcaacgaacctcactttgtaggctctgcctatgtacctgagagtgtgggcagcttcacgggggacgacgacaaggtctacttcttcttcagggagcgggcagtggagtccgactgctatgccgagcaggtggtggctcgtgtggcccgtgtctgcaagggcgatatggggggcgcacggaccctgcagaggaagtggaccacgttcctgaaggcgcggctggcatgctctgccccgaactggcagctctacttcaaccagctgcaggcgatgcacaccctgcaggacacctcctggcacaacaccaccttctttggggtttttcaagcacagtggggtgacatgtacctgtcggccatctgtgagtaccagttggaagagatccagcgggtgtttgagggcccctataaggagtaccatgaggaagcccagaagtgggaccgctacactgaccctgtacccagccctcggcctggctcgtgcattaacaactggcatcggcgccacggctacaccagctccctggagctacccgacaacatcctcaacttcgtcaagaagcacccgctgatggaggagcaggtggggcctcggtggagccgccccctgctcgtgaagaagggcaccaacttcacccacctggtggccgaccgggttacaggacttgatggagccacctatacagtgctgttcattggcacaggagacggctggctgctcaaggctgtgagcctggggccctgggttcacctgattgaggagctgcagctgtttgaccaggagcccatgagaagcctggtgctatctcagagcaagaagctgctctttgccggctcccgctctcagctggtgcagctgcccgtggccgactgcatgaagtatcgctcctgtgcagactgtgtcctcgcccgggacccctattgcgcctggagcgtcaacaccagccgctgtgtggccgtgggtggccactctggatctctactgatccagcatgtgatgacctcggacacttcaggcatctgcaacctccgtggcagtaagaaagtcaggcccactcccaaaaacatcacggtggtggcgggcacagacctggtgctgccctgccacctctcctccaacttggcccatgcccgctggacctttgggggccgggacctgcctgcggaacagcccgggtccttcctctacgatgcccggctccaggccctggttgtgatggctgcccagccccgccatgccggggcctaccactgcttttcagaggagcagggggcgcggctggctgctgaaggctaccttgtggctgtcgtggcaggcccgtcggtgaccttggaggcccgggcccccctggaaaacctggggctggtgtggctggcggtggtggccctgggggctgtgtgcctggtgctgctgctgctggtgctgtcattgcgccggcggctgcgggaagagctggagaaaggggccaaggctactgagaggaccttggtgtaccccctggagctgcccaaggagcccaccagtccccccttccggccctgtcctgaaccagatgagaaactttgggatcctgtcggttactactattcagatggctcccttaagatagtacctgggcatgcccggtgccagcccggtggggggcccccttcgccacctccaggcatcccaggccagcctctgccttctccaactcggcttcacctggggggtgggcggaactcaaatgccaatggttacgtgcgcttacaactaggaggggaggaccggggagggctcgggcaccccctgcctgagctcgcggatgaactgagacgcaaactgcagcaacgccagccactgcccgactccaaccccgaggagtcatcagtatgaggggaacccccaccgcgtcggcgggaagcgtgggaggtgtagctcctacttttgcacaggcaccagctacctcagggacatggcacgggcacctgctctgtctgggacagatactgcccagcacccacccggccatgaggacctgctctgctcagcacgggcactgccacttggtgtggctcaccagggcaccagcctcgcagaaggcatcttcctcctctctgtgaatcacagacacgcgggaccccagccgccaaaacttttcaaggcagaagtttcaagatgtgtgtttgtctgtatttgcacatgtgtttgtgtgtgtgtgtatgtgtgtgtgcacgcgcgtgcgcgcttgtggcatagccttcctgtttctgtcaagtcttcccttggcctgggtcctcctggtgagtcattggagctatgaaggggaaggggtcgtatcactttgtctctcctacccccactgccccgagtgtcgggcagcgatgtacatatggaggtggggtggacagggtgctgtgccccttcagagggagtgcagggcttggggtgggcctagtcctgctcctagggctgtgaatgttttcagggtggggggagggagatggagcctcctgtgtgtttggggggaagggtgggtggggcctcccacttggccccggggttcagtggtattttatacttgccttcttcctgtacagggctgggaaaggctgtgtgaggggagagaagggagagggtgggcctgctgtggacaatggcatactctcttccagccctaggaggagggctcctaacagtgtaacttattgtgtccccgcgtatttatttgttgtaaatatttgagtatttttatattgacaaataaaatggagaaaatgaaacga

SEQ ID NO: 1735 - protein, 882 aa, Homo sapiens
MASSGRKLWLRYPSFLPAAWICLLPGWERLGRPRWGCQGQRLFQKCPLLPIRGFGWHLLVAWGAGSRGARLRAVEPQGSCPSAAMLTPAELATVVRRFSQTGIQDFLTLTLTEPTGLLYVGAREALFAFSMEALELQGAISWEAPVEKKTECIQKGKNNQTECFNFIRFLQPYNASHLYVCGTYAFQPKCTYVNMLTFTLEHGEFEDGKGKCPYDPAKGHAGLLVDGEKATLNNFLGTEPIILRNMGPHHSMKTEYLAFWLNEPHFVGSAYVPESVGSFTGDDDKVYFFFRERAVESDCYAEQVVARVARVCKGDMGGARTLQRKWTTFLKARLACSAPNWQLYFNQLQAMHTLQDTSWHNTTFFGVFQAQWGDMYLSAICEYQLEEIQRVFEGPYKEYHEEAQKWDRYTDPVPSPRPGSCINNWHRRHGYTSSLELPDNILNFVKKHPLMEEQVGPRWSRPLLVKKGTNFTHLVADRVTGLDGATYTVLFIGTGDGWLLKAVSLGPWVHLIEELQLFDQEPMRSLVLSQSKKLLFAGSRSQLVQLPVADCMKYRSCADCVLARDPYCAWSVNTSRCVAVGGHSGSLLIQHVMTSDTSGICNLRGSKKVRPTPKNITVVAGTDLVLPCHLSSNLAHARWTFGGRDLPAEQPGSFLYDARLQALVVMAAQPRHAGAYHCFSEEQGARLAAEGYLVAVVAGPSVTLEARAPLENLGLVWLAVVGAVCLVLLLLVLSLRRRLREELEKGAKATERTLVYPLELPKEPTSPPFRPCPEPDEKLWDPVGYYYSDGSLKIVPGHARCQPGGGPPSPPPGIPGQPLPSPTRLHLGGGRNSNANGYVRLQLGGEDRGGLGHPLPELADELRRKLQQRQPLPDSNPEESSV

SEQ ID NO: 1736 - DNA, 2606 bp, Homo sapiens
ggcgatatggggggcgcacggaccctgcagaggaagtggaccacgttcctgaaggcgcggctggcatgctctgccccgaactggcagctctacttcaaccagctgcaggcgatgcacaccctgcaggacacctcctggcacaacaccaccttctttggggtttttcaagcacagtggggtgacatgtacctgtcggccatctgtgagtaccagttggaagagatccagcgggtgtttgagggcccctataaggagtaccatgaggaagcccagaagtgggaccgctacactgaccctgtacccagccctcggcctggctcgtgcattaacaactggcatcggcgccacggctacaccagctccctggagctacccgacaacatcctcaacttcgtcaagaagcacccgctgatggaggagcaggtggggcctcggtggagccgccccctgctcgtgaagaagggcaccaacttcacccacctggtggccgaccgggttacaggacttgatggagccacctatacagtgctgttcattggcacaggagacggctggctgctcaaggctgtgagcctggggccctgggttcacctgattgaggagctgcagctgtttgaccaggagcccatgagaagcctggtgctatctcagagcaagaagctgctctttgccggctcccgctctcagctggtgcagctgcccgtggccgactgcatgaagtatcgctcctgtgcagactgtgtcctcgcccgggacccctattgcgcctggagcgtcaacaccagccgctgtgtggccgtgggtggccactctggatctctactgatccagcatgtgatgacctcggacacttcaggcatctgcaacctccgtggcagtaagaaagtcaggcccactcccaaaaacatcacggtggtggcgggcacagacctggtgctgccctgccacctctcctccaacttggcccatgcccgctggacctttgggggccgggacctgcctgcggaacagcccgggtccttcctctacgatgcccggctccaggccctggttgtgatggctgcccagccccgccatgccggggcctaccactgcttttcagaggagcagggggcgcggctggctgctgaaggctaccttgtggctgtcgtggcaggcccgtcggtgaccttggaggcccgggcccccctggaaaacctggggctggtgtggctggcggtggtggccctgggggctgtgtgcctggtgctgctgctgctggtgctgtcattgcgccggcggctgcgggaagagctggagaaaggggccaaggctactgagaggaccttggtgtaccccctggagctgcccaaggagcccaccagtccccccttccggccctgtcctgaaccagatgagaaactttgggatcctgtcggttactactattcagatggctcccttaagatagtacctgggcatgcccggtgccagcccggtggggggcccccttcgccacctccaggcatcccaggccagcctctgccttctccaactcggcttcacctggggggtgggcggaactcaaatgccaatggttacgtgcgcttacaactaggaggggaggaccggggagggctcgggcaccccctgcctgagctcgcggatgaactgagacgcaaactgcagcaacgccagccactgcccgactccaaccccgaggagtcatcagtatgaggggaacccccaccgcgtcggcgggaagcgtgggaggtgtagctcctacttttgcacaggcaccagctacctcagggacatggcacgggcacctgctctgtctgggacagatactgcccagcacccacccggccatgaggacctgctctgctcagcacgggcactgccacttggtgtggctcaccagggcaccagcctcgcagaaggcatcttcctcctctctgtgaatcacagacacgcgggaccccagccgccaaaacttttcaaggcagaagtttcaagatgtgtgtttgtctgtatttgcacatgtgtttgtgtgtgtgtgtatgtgtgtgtgcacgcgcgtgcgcgcttgtggcatagccttcctgtttctgtcaagtcttcccttggcctgggtcctcctggtgagtcattggagctatgaaggggaaggggtcgtatcactttgtctctcctacccccactgccccgagtgtcgggcagcgatgtacatatggaggtggggtggacagggtgctgtgccccttcagagggagtgcagggcttggggtgggcctagtcctgctcctagggctgtgaatgttttcagggtggggggagggagatggagcctcctgtgtgtttggggggaagggtgggtggggcctcccacttggccccggggttcagtggtattttatacttgccttcttcctgtacagggctgggaaaggctgtgtgaggggagagaagggagagggtgggcctgctgtggacaatggcatactctcttccagccctaggaggagggctcctaacagtgtaacttattgtgtccccgcgtatttatttgttgtaaatatttgagtatttttatattgacaaataaaatggagaaaatgaaacga

SEQ ID NO: 1737 - protein, 567 aa, Homo sapiens
MGGARTLQRKWTTFLKARLACSAPNWQLYFNQLQAMHTLQDTSWHNTTFFGVFQAQWGDMYLSAICEYQLEEIQRVFEGPYKEYHEEAQKWDRYTDPVPSPRPGSCINNWHRRHGYTSSLELPDNILNFVKKHPLMEEQVGPRWSRPLLVKKGTNFTHLVADRVTGLDGATYTVLFIGTGDGWLLKAVSLGPWVHLIEELQLFDQEPMRSLVLSQSKKLLFAGSRSQLVQLPVADCMKYRSCADCVLARDPYCAWSVNTSRCVAVGGHSGSLLIQHVMTSDTSGICNLRGSKKVRPTPKNITVVAGTDLVLPCHLSSNLAHARWTFGGRDLPAEQPGSFLYDARLQALVVMAAQPRHAGAYHCFSEEQGARLAAEGYLVAVVAGPSVTLEARAPLENLGLVWLAVVGAVCLVLLLLVLSLRRRLREELEKGAKATERTLVYPLELPKEPTSPPFRPCPEPDEKLWDPVGYYYSDGSLKIVPGHARCQPGGGPPSPPPGIPGQPLPSPTRLHLGGGRNSNANGYVRLQLGGEDRGGLGHPLPELADELRRKLQQRQPLPDSNPEESSV

SEQ ID NO: 1738 - DNA, 3523 bp, Homo sapiens
gctggagaaagagccggcgcccgccgtggtggcgcggggagcccgagcctaggggcgcggagccgggcggggacggaggggcggtggcagagaggccgcggagggctggcgggcgagcgcgggcaggcggcgacgcgggggcaggggtggacggcggtcagagccgaacgcgagggcggcgcccggggactggagctgcgcgcaatagcaggacagctggcctgaagctcagagccggggcgtgcgccatggccccacactgggctgtctggctgctggcagcaaggctgtggggcctgggcattggggctgaggtgtggtggaaccttgtgccgcgtaagacagtgtcttctggggagctggccacggtagtacggcggttctcccagaccggcatccaggacttcctgacactgacgctgacggagcccactgggcttctgtacgtgggcgcccgagaggccctgtttgccttcagcatggaggccctggagctgcaaggagcgatctcctgggaggcccccgtggagaagaagactgagtgtatccagaaagggaagaacaaccagaccgagtgcttcaacttcatccgcttcctgcagccctacaatgcctcccacctgtacgtctgtggcacctacgccttccagcccaagtgcacctacgtcaacatgctcaccttcactttggagcatggagagtttgaagatgggaagggcaagtgtccctatgacccagctaagggccatgctggccttcttgtggaacctcactttgtaggctctgcctatgtacctgagagtgtgggcagcttcacgggggacgacgacaaggtctacttcttcttcagggagcgggcagtggagtccgactgctatgccgagcaggtggtggctcgtgtggcccgtgtctgcaagggcgatatggggggcgcacggaccctgcagaggaagtggaccacgttcctgaaggcgcggctggcatgctctgccccgaactggcagctctacttcaaccagctgcaggcgatgcacaccctgcaggacacctcctggcacaacaccaccttctttggggtttttcaagcacagtggggtgacatgtacctgtcggccatctgtgagtaccagttggaagagatccagcgggtgtttgagggcccctataaggagtaccatgaggaagcccagaagtgggaccgctacactgaccctgtacccagccctcggcctggctcgtgcattaacaactggcatcggcgccacggctacaccagctccctggagctacccgacaacatcctcaacttcgtcaagaagcacccgctgatggaggagcaggtggggcctcggtggagccgccccctgctcgtgaagaagggcaccaacttcacccacctggtggccgaccgggttacaggacttgatggagccacctatacagtgctgttcattggcacaggagacggctggctgctcaaggctgtgagcctggggccctgggttcacctgattgaggagctgcagctgtttgaccaggagcccatgagaagcctggtgctatctcagagcaagaagctgctctttgccggctcccgctctcagctggtgcagctgcccgtggccgactgcatgaagtatcgctcctgtgcagactgtgtcctcgcccgggacccctattgcgcctggagcgtcaacaccagccgctgtgtggccgtgggtggccactctggatctctactgatccagcatgtgatgacctcggacacttcaggcatctgcaacctccgtggcagtaagaaagtcaggcccactcccaaaaacatcacggtggtggcgggcacagacctggtgctgccctgccacctctcctccaacttggcccatgcccgctggacctttgggggccgggacctgcctgcggaacagcccgggtccttcctctacgatgcccggctccaggccctggttgtgatggctgcccagccccgccatgccggggcctaccactgcttttcagaggagcagggggcgcggctggctgctgaaggctaccttgtggctgtcgtggcaggcccgtcggtgaccttggaggcccgggcccccctggaaaacctggggctggtgtggctggcggtggtggccctgggggctgtgtgcctggtgctgctgctgctggtgctgtcattgcgccggcggctgcgggaagagctggagaaaggggccaaggctactgagaggaccttggtgtaccccctggagctgcccaaggagcccaccagtccccccttccggccctgtcctgaaccagatgagaaactttgggatcctgtcggttactactattcagatggctcccttaagatagtacctgggcatgcccggtgccagcccggtggggggcccccttcgccacctccaggcatcccaggccagcctctgccttctccaactcggcttcacctggggggtgggcggaactcaaatgccaatggttacgtgcgcttacaactaggaggggaggaccggggagggctcgggcaccccctgcctgagctcgcggatgaactgagacgcaaactgcagcaacgccagccactgcccgactccaaccccgaggagtcatcagtatgaggggaacccccaccgcgtcggcgggaagcgtgggaggtgtagctcctacttttgcacaggcaccagctacctcagggacatggcacgggcacctgctctgtctgggacagatactgcccagcacccacccggccatgaggacctgctctgctcagcacgggcactgccacttggtgtggctcaccagggcaccagcctcgcagaaggcatcttcctcctctctgtgaatcacagacacgcgggaccccagccgccaaaacttttcaaggcagaagtttcaagatgtgtgtttgtctgtatttgcacatgtgtttgtgtgtgtgtgtatgtgtgtgtgcacgcgcgtgcgcgcttgtggcatagccttcctgtttctgtcaagtcttcccttggcctgggtcctcctggtgagtcattggagctatgaaggggaaggggtcgtatcactttgtctctcctacccccactgccccgagtgtcgggcagcgatgtacatatggaggtggggtggacagggtgctgtgccccttcagagggagtgcagggcttggggtgggcctagtcctgctcctagggctgtgaatgttttcagggtggggggagggagatggagcctcctgtgtgtttggggggaagggtgggtggggcctcccacttggccccggggttcagtggtattttatacttgccttcttcctgtacagggctgggaaaggctgtgtgaggggagagaagggagagggtgggcctgctgtggacaatggcatactctcttccagccctaggaggagggctcctaacagtgtaacttattgtgtccccgcgtatttatttgttgtaaatatttgagtatttttatattgacaaataaaatggagaaaatgaaacga

SEQ ID NO: 1739 - protein, 792 aa, Homo sapiens
MAPHWAVWLLAARLWGLGIGAEVWWNLVPRKTVSSGELATVVRRFSQTGIQDFLTLTLTEPTGLLYVGAREALFAFSMEALELQGAISWEAPVEKKTECIQKGKNNQTECFNFIRFLQPYNASHLYVCGTYAFQPKCTYVNMLTFTLEHGEFEDGKGKCPYDPAKGHAGLLVEPHFVGSAYVPESVGSFTGDDDKVYFFFRERAVESDCYAEQVVARVARVCKGDMGGARTLQRKWTTFLKARLACSAPNWQLYFNQLQAMHTLQDTSWHNTTFFGVFQAQWGDMYLSAICEYQLEEIQRVFEGPYKEYHEEAQKWDRYTDPVPSPRPGSCINNWHRRHGYTSSLELPDNILNFVKKHPLMEEQVGPRWSRPLLVKKGTNFTHLVADRVTGLDGATYTVLFIGTGDGWLLKAVSLGPWVHLIEELQLFDQEPMRSLVLSQSKKLLFAGSRSQLVQLPVADCMKYRSCADCVLARDPYCAWSVNTSRCVAVGGHSGSLLIQHVMTSDTSGICNLRGSKKVRPTPKNITVVAGTDLVLPCHLSSNLAHARWTFGGRDLPAEQPGSFLYDARLQALVVMAAQPRHAGAYHCFSEEQGARLAAEGYLVAVVAGPSVTLEARAPLENLGLVWLAVVGAVCLVLLLLVLSLRRRLREELEKGAKATERTLVYPLELPKEPTSPPFRPCPEPDEKLWDPVGYYYSDGSLKIVPGHARCQPGGGPPSPPPGIPGQPLPSPTRLHLGGGRNSNANGYVRLQLGGEDRGGLGHPLPELADELRRKLQQRQPLPDSNPEESSV

SEQ ID NO: 1740 - DNA, 3579 bp, Homo sapiens
tcgggaagctgggccccttcgctcccggcccttctcacactcctgccctgctgatgtggaacggggtttggggttctgcagggctattgtctgcgctggggaaggggacaggccgggaccgggacctccgctcgcagccggccgcaccaggacagctggcctgaagctcagagccggggcgtgcgccatggccccacactgggctgtctggctgctggcagcaaggctgtggggcctgggcattggggctgaggtgtggtggaaccttgtgccgcgtaagacagtgtcttctggggagctggccacggtagtacggcggttctcccagaccggcatccaggacttcctgacactgacgctgacggagcccactgggcttctgtacgtgggcgcccgagaggccctgtttgccttcagcatggaggccctggagctgcaaggagcgatctcctgggaggcccccgtggagaagaagactgagtgtatccagaaagggaagaacaaccagaccgagtgcttcaacttcatccgcttcctgcagccctacaatgcctcccacctgtacgtctgtggcacctacgccttccagcccaagtgcacctacgtcaacatgctcaccttcactttggagcatggagagtttgaagatgggaagggcaagtgtccctatgacccagctaagggccatgctggccttcttgtggatggtgagctgtactcggccacactcaacaacttcctgggcacggaacccattatcctgcgtaacatggggccccaccactccatgaagacagagtacctggccttttggctcaacgaacctcactttgtaggctctgcctatgtacctgagagtgtgggcagcttcacgggggacgacgacaaggtctacttcttcttcagggagcgggcagtggagtccgactgctatgccgagcaggtggtggctcgtgtggcccgtgtctgcaagggcgatatggggggcgcacggaccctgcagaggaagtggaccacgttcctgaaggcgcggctggcatgctctgccccgaactggcagctctacttcaaccagctgcaggcgatgcacaccctgcaggacacctcctggcacaacaccaccttctttggggtttttcaagcacagtggggtgacatgtacctgtcggccatctgtgagtaccagttggaagagatccagcgggtgtttgagggcccctataaggagtaccatgaggaagcccagaagtgggaccgctacactgaccctgtacccagccctcggcctggctcgtgcattaacaactggcatcggcgccacggctacaccagctccctggagctacccgacaacatcctcaacttcgtcaagaagcacccgctgatggaggagcaggtggggcctcggtggagccgccccctgctcgtgaagaagggcaccaacttcacccacctggtggccgaccgggttacaggacttgatggagccacctatacagtgctgttcattggcacaggagacggctggctgctcaaggctgtgagcctggggccctgggttcacctgattgaggagctgcagctgtttgaccaggagcccatgagaagcctggtgctatctcagagcaagaagctgctctttgccggctcccgctctcagctggtgcagctgcccgtggccgactgcatgaagtatcgctcctgtgcagactgtgtcctcgcccgggacccctattgcgcctggagcgtcaacaccagccgctgtgtggccgtgggtggccactctggatctctactgatccagcatgtgatgacctcggacacttcaggcatctgcaacctccgtggcagtaagaaagtcaggcccactcccaaaaacatcacggtggtggcgggcacagacctggtgctgccctgccacctctcctccaacttggcccatgcccgctggacctttgggggccgggacctgcctgcggaacagcccgggtccttcctctacgatgcccggctccaggccctggttgtgatggctgcccagccccgccatgccggggcctaccactgcttttcagaggagcagggggcgcggctggctgctgaaggctaccttgtggctgtcgtggcaggcccgtcggtgaccttggaggcccgggcccccctggaaaacctggggctggtgtggctggcggtggtggccctgggggctgtgtgcctggtgctgctgctgctggtgctgtcattgcgccggcggctgcgggaagagctggagaaaggggccaaggctactgagaggaccttggtgtaccccctggagctgcccaaggagcccaccagtccccccttccggccctgtcctgaaccagatgagaaactttgggatcctgtcggttactactattcagatggctcccttaagatagtacctgggcatgcccggtgccagcccggtggggggcccccttcgccacctccaggcatcccaggccagcctctgccttctccaactcggcttcacctggggggtgggcggaactcaaatgccaatggttacgtgcgcttacaactaggaggggaggaccggggagggctcgggcaccccctgcctgagctcgcggatgaactgagacgcaaactgcagcaacgccagccactgcccgactccaaccccgaggagtcatcagtatgaggggaacccccaccgcgtcggcgggaagcgtgggaggtgtagctcctacttttgcacaggcaccagctacctcagggacatggcacgggcacctgctctgtctgggacagatactgcccagcacccacccggccatgaggacctgctctgctcagcacgggcactgccacttggtgtggctcaccagggcaccagcctcgcagaaggcatcttcctcctctctgtgaatcacagacacgcgggaccccagccgccaaaacttttcaaggcagaagtttcaagatgtgtgtttgtctgtatttgcacatgtgtttgtgtgtgtgtgtatgtgtgtgtgcacgcgcgtgcgcgcttgtggcatagccttcctgtttctgtcaagtcttcccttggcctgggtcctcctggtgagtcattggagctatgaaggggaaggggtcgtatcactttgtctctcctacccccactgccccgagtgtcgggcagcgatgtacatatggaggtggggtggacagggtgctgtgccccttcagagggagtgcagggcttggggtgggcctagtcctgctcctagggctgtgaatgttttcagggtggggggagggagatggagcctcctgtgtgtttggggggaagggtgggtggggcctcccacttggccccggggttcagtggtattttatacttgccttcttcctgtacagggctgggaaaggctgtgtgaggggagagaagggagagggtgggcctgctgtggacaatggcatactctcttccagccctaggaggagggctcctaacagtgtaacttattgtgtccccgcgtatttatttgttgtaaatatttgagtatttttatattgacaaataaaatggagaaaatgaaacga

SEQ ID NO: 1741 - protein, 829 aa, Homo sapiens
MAPHWAVWLLAARLWGLGIGAEVWWNLVPRKTVSSGELATVVRRFSQTGIQDFLTLTLTEPTGLLYVGAREALFAFSMEALELQGAISWEAPVEKKTECIQKGKNNQTECFNFIRFLQPYNASHLYVCGTYAFQPKCTYVNMLTFTLEHGEFEDGKGKCPYDPAKGHAGLLVDGEKATLNNFLGTEPIILRNMGPHHSMKTEYLAFWLNEPHFVGSAYVPESVGSFTGDDDKVYFFFRERAVESDCYAEQVVARVARVCKGDMGGARTLQRKWTTFLKARLACSAPNWQLYFNQLQAMHTLQDTSWHNTTFFGVFQAQWGDMYLSAICEYQLEEIQRVFEGPYKEYHEEAQKWDRYTDPVPSPRPGSCINNWHRRHGYTSSLELPDNILNFVKKHPLMEEQVGPRWSRPLLVKKGTNFTHLVADRVTGLDGATYTVLFIGTGDGWLLKAVSLGPWVHLIEELQLFDQEPMRSLVLSQSKKLLFAGSRSQLVQLPVADCMKYRSCADCVLARDPYCAWSVNTSRCVAVGGHSGSLLIQHVMTSDTSGICNLRGSKKVRPTPKNITVVAGTDLVLPCHLSSNLAHARWTFGGRDLPAEQPGSFLYDARLQALVVMAAQPRHAGAYHCFSEEQGARLAAEGYLVAVVAGPSVTLEARAPLENLGLVWLAVVGAVCLVLLLLVLSLRRRLREELEKGAKATERTLVYPLELPKEPTSPPFRPCPEPDEKLWDPVGYYYSDGSLKIVPGHARCQPGGGPPSPPPGIPGQPLPSPTRLHLGGGRNSNANGYVRLQLGGEDRGGLGHPLPELADELRRKLQQRQPLPDSNPEESSV
